(19) United States
(12) Patent Application Publication
(10) Pub. No.: US 2024/0279342 A1
(43) Pub. Date: Aug. 22, 2024

(54) COMPOSITIONS AND METHODS FOR IMMUNOTHERAPY

(71) Applicant: SURFACE ONCOLOGY, INC., Cambridge, MA (US)

(72) Inventors: James MOHAN, Cambridge, MA (US); Marisella Panduro SICHEVA, Cambridge, MA (US)

(21) Appl. No.: 17/775,981

(22) PCT Filed: Nov. 13, 2020
(86) PCT No.: PCT/US2020/060524

§ 371 Date: May 11, 2022

Related U.S. Application Data
(60) Provisional application No. 62/936,176, filed on Nov. 15, 2019.

(51) Int. Cl. C07K 16/28; A61K 39/00; A61K 45/06; A61P 35/00

(52) U.S. Cl. CPC C07K 16/283; A61K 45/06; A61P 35/00; C07K 16/2803; A61K 2039/505; C07K 2317/52; C07K 2317/55; C07K 2317/74

(57) ABSTRACT

The invention provides compositions and methods for engaging, coupling, or binding CD16 and CD112R to preferentially activate NK cells for use in treating cancer.

[0001] This application claims the benefit of priority to U.S. Provisional Application No. 62/936,176, filed Nov. 15, 2019 which is incorporated by reference in its entirety.

### SEQUENCE LISTING

[0002] The instant application contains a Sequence Listing which has been submitted electronically in ASCII format and is hereby incorporated by reference in its entirety. Said ASCII copy, created on Nov. 8, 2022, is named LU67074US01_SL.txt and is 1,501,851 bytes in size.

### BACKGROUND

[0003] Both the innate and adaptive arms of the immune system utilize highly specialized immune cells to patrol the body, searching for signs of malignancy. Innate immunity provides the first line of defense and a rapid response using mechanisms such as barriers and destructive peptides that are non-specific and naturally present. Natural killer (NK) cells are a type of lymphocyte that is part of the innate immune system and can recognize and destroy virally infected and tumor cells using granzymes stored in their cytoplasm.

[0004] Adaptive immunity develops over time in response to antigen and provides lasting immunity. Cytotoxic lymphocytes (CTLs), also known as CD8+ T cells are part of the adaptive immune response as they recognize virus and tumor derived antigens presented by antigen presenting cells (APCs). CTLs are activated by interaction with an APC such as a dendritic cell or macrophage. The APC presents the tumor antigens in the context of MHC molecules to the T cell receptor (TCR) on the T cell surface. During this cognate interaction, the APC provides a costimulatory signal which leads to T cell activation, T cell proliferation, and reduction or elimination of cells expressing the antigen via cytotoxic mechanisms.

[0005] Administration of anti-CD112R immunotherapy provides an opportunity to increase, enhance and sustain immune responses. CD112R is an inhibitory receptor primarily expressed by T cells and NK cells and competes for CD112 binding with the activating receptor CD226. The interaction of CD112 with CD112R is of higher affinity than with CD226 and thereby effectively regulates CD226 mediated cell activation. Anti-CD112R antibodies that block the interaction with CD112 limit inhibitory signaling directly downstream of CD112R while simultaneously promoting greater immune cell activation by increasing CD226 interactions with CD112. In in vitro studies, anti-CD112R antibodies have been shown to increase the proliferation, activation and cytotoxicity of immune effector cells.

[0006] CD112R mRNA expression is detected in a number of cancer tissues and based on predictive analysis using TCGA (The Cancer Genome Atlas) dataset. Its expression is strongest in tumors that are enriched for T and NK cells. In addition to being expressed on myeloid cells, the expression of the CD112R ligand, CD112, is routinely elevated on tumor cells of different cellular origins. Given these circumstances, engagement of CD112R on tumor infiltrating immune cells has a strong potential to negatively regulate local immune responses within the tumor microenvironment.

[0007] Despite the successes of anti-CD112R immunotherapy, improved therapies for treating cancer as well as therapies for treating cancers that are PD-1/PD-L1 resistant are needed. Therapeutic treatment with agents that couple CD112R and CD16 provide an opportunity to down modulate the inhibitory signaling that occurs putatively when CD112R expressing immune cells engage CD112 on tumor cells and/or myeloid cells within the tumor microenvironment and has the potential to enhance, increase and sustain anti-tumor immune responses. Provided herein are compositions and methods for use in coupling, simultaneously binding, and/or engaging CD112R and CD16 to treat cancer.

### BRIEF DESCRIPTION OF THE FIGURES

[0008] FIG. 1A shows a schematic of a tumor microenvironment.

[0009] FIG. 1B shows that CD112R expression is increased on activated NK and T cells.

[0010] FIG. 2 shows that CD112R is upregulated on CT26 tumor infiltrating NK and CD8⁺ T cells.

[0011] FIG. 3A shows a schematic of clone 35 coupling CD112R and CD16 on NK cells.

[0012] FIG. 3B shows the results of an NK activation assay with anti-CD112R antibodies: clone 35 (IgG1/IgG4), clone 38 (IgG1/IgG4), and clone 44 (IgG1/IgG4).

[0013] FIG. 4A shows that CD112R overexpression abrogates T cell activation.

[0014] FIG. 4B shows that clone 35 enhances T cell activation as compared to isotype control.

[0015] FIG. 5A shows the results of an in vitro NK cell activity assay.

[0016] FIG. 5B shows tumor volume after administration of anti-CD112R antibody (clone 46) in mouse IgG1 (which is analogous to human IgG4) and mouse IgG2a (which is analogous to human IgG1).

[0017] FIG. 6A shows that anti-CD112R activity is NK and T cell dependent.

[0018] FIG. 6B shows immunological memory in mice treated with anti-CD112R upon re-challenge.

[0019] FIGS. 7A and 7B show clone 35 compared to clone 35.4 in a NK activation assay in two donors.

[0020] FIGS. 8A-8B show Granzyme B+ (FIG. 8A) and percent interferon-γ+ (FIG. 8B) levels after treatment with anti-CD112R (clone 46), anti-TIGIT, or a combination of anti-CD112R (clone 46) and anti-TIGIT.

[0021] FIG. 9 shows tumor volume in a CT26 model of cancer for an anti-CD112R (clone 46) antibody in mIgG1/hIgG4 format versus mIgG2a/hIgG1 format.

[0022] FIG. 10A-10B show results of an in vivo study of changes in tumor volume upon administration of clone 46 in a mIgG2a/hIgG1 format.

[0023] FIG. 11A-11C show the results of additional experiments demonstrating 4-1BB induction on NK cells co-cultured with K562 cells in the presence of 1 μg/mL Clone 35 or Clone 35-Fab, compared to a hIgG1 isotype control antibody or control Fab (n=5 donors) (FIG. 11A), 4-1BB induction on NK cells co-cultured with K562 cells in the presence of 1 μg/mL Clone 35, Clone 35-IgG4, or with an IgG1 mutant (Clone 35-N297A), compared with hIgG1 isotype control (n=5) (FIG. 11B), and the impact of 1 μg/mL Clone 35 on NK cell activation following co-culture with K562 cells in the presence of 2 μg/mL anti-CD16, anti-CD32, or mIgG1 control Fab molecules (n=5). (* P<0.05, ** P<0.01: paired t-test) (FIG. 11C).

### DETAILED DESCRIPTION OF EMBODIMENTS OF THE INVENTION

### I. Definitions

[0024] In this application, the use of “or” means “and/or” unless stated otherwise. In the context of a multiple dependent claim, the use of “or” refers back to more than one preceding independent or dependent claim in the alternative only. The terms “comprising.” “including,” and “having” can be used interchangeably herein.

[0025] The terms “CD112R,” “PVR Related Immunoglobulin Domain Containing,” “CD112 Receptor,” “Poliovirus Receptor-Related Immunoglobulin Domain-Containing Protein” “Poliovirus Receptor Related Immunoglobulin Domain Containing,” “Nectin-2 Receptor,” “C7orf15,” and “Transmembrane Protein PVRIG” are all used interchangeably and refer to a native, human CD112R, unless otherwise specifically indicated (e.g. mouse CD112R, cynomolgus CD112R, etc.). The term includes full-length, unprocessed CD112R as well as any form of CD112R that results from processing in the cell. The term encompasses naturally occurring variants of human CD112R, e.g., splice variants or allelic variants. External ID's for CD112R gene include Entrez Gene: 79037, Ensembl: ENSG00000213413, OMIM: 617012, and UniProtKB: Q6DKI7.

[0026] “Affinity” refers to the strength of the sum total of noncovalent interactions between a single binding site of a molecule (e.g., an antibody) and its binding partner (e.g., an antigen). Unless indicated otherwise, as used herein, “binding affinity” refers to intrinsic binding affinity which reflects a 1:1 interaction between members of a binding pair (e.g., antibody and antigen). The affinity of a molecule X for its partner Y can generally be represented by the dissociation constant (K_{D}). Affinity can be measured by common methods known in the art, including those described herein. Specific illustrative and exemplary embodiments for measuring binding affinity are described in the following.

[0027] An “affinity matured” antibody refers to an antibody with one or more alterations in one or more hypervariable regions (HVRs), compared to a parent antibody which does not possess such alterations, such alterations optionally resulting in an improvement in the affinity of the antibody for antigen.

[0028] The term “antibody” herein is used in the broadest sense and encompasses various antibody structures, including but not limited to monoclonal antibodies, polyclonal antibodies, multispecific antibodies (e.g., bispecific antibodies), and antibody fragments so long as they exhibit the desired antigen-binding activity.

[0029] An “antibody fragment” refers to a molecule other than an intact antibody that comprises a portion of an intact antibody that binds the antigen to which the intact antibody binds. Examples of antibody fragments include but are not limited to Fv, Fab, Fab′, Fab′-SH, F(ab′)₂: diabodies: linear antibodies: single-chain antibody molecules (e.g. scFv); and multispecific antibodies formed from antibody fragments.

[0030] The term “block,” in the context of an interaction between two or more molecules, is used herein to refer to inhibition or prevention of said interaction between the two or more molecules, wherein the inhibition or prevention of said interaction between the two or more molecules is complete or nearly complete under at least one condition. A “nearly complete” inhibition is a percent inhibition of about 70-99.9%, and a “complete” inhibition is 100%. For example, a molecule is said to “block” an interaction between two or more other molecules if it completely or nearly completely inhibits such interaction at certain concentrations in a dose dependent manner.

[0031] The term “cancer” is used herein to refer to a group of cells that exhibit abnormally high levels of proliferation and growth. A cancer may be benign (also referred to as a benign tumor), pre-malignant, or malignant. Cancer cells may be solid cancer cells or leukemic cancer cells. The term “tumor” is used herein to refer to a cell or cells that comprise a cancer. The term “tumor growth” is used herein to refer to proliferation or growth by a cell or cells that comprise a cancer that leads to a corresponding increase in the size or extent of the cancer.

[0032] “CD16” is also known in the art as FcγRIII and is often found on the surface of natural killer (NK) cells, neutrophils, monocytes, and macrophages.

[0033] The term “chimeric” antibody refers to an antibody in which a portion of the heavy and/or light chain is derived from a particular source or species, while the remainder of the heavy and/or light chain is derived from a different source or species.

[0034] The “class” of an antibody refers to the type of constant domain or constant region possessed by its heavy chain. There are five major classes of antibodies: IgA, IgD, IgE, IgG, and IgM, and several of these may be further divided into subclasses (isotypes), e.g., IgG₁, IgG₂, IgG₃, IgG₄, IgA₁, and IgA₂. The heavy chain constant domains that correspond to the different classes of immunoglobulins are called α, δ, ε, γ, and μ, respectively.

[0035] Administration “in combination with” one or more further therapeutic agents includes simultaneous (concurrent) and consecutive (sequential) administration in any order. “Simultaneous binding” (and iterations thereof) refers to a composition that is capable of binding to a target or targets at the same time at any one time point. Simultaneous binding does not require binding to a target or targets at the same time at every time point.

[0036] The term “cytotoxic agent” as used herein refers to a substance that inhibits or prevents a cellular function and/or causes cell death or destruction. Cytotoxic agents include, but are not limited to, radioactive isotopes (e.g., At²¹¹, I¹³¹, I¹²⁵, Y⁹⁰, Re¹⁸⁶, Re¹⁸⁸, Sm¹⁵³, Bi²¹², P³², Pb²¹² and radioactive isotopes of Lu); chemotherapeutic agents or drugs (e.g., methotrexate, adriamicin, vinca alkaloids (vincristine, vinblastine, etoposide), doxorubicin, melphalan, mitomycin C, chlorambucil, daunorubicin or other intercalating agents); growth inhibitory agents; enzymes and fragments thereof such as nucleolytic enzymes; antibiotics; toxins such as small molecule toxins or enzymatically active toxins of bacterial, fungal, plant or animal origin, including fragments and/or variants thereof; and the various antitumor or anticancer agents disclosed below.

[0037] “Effector functions” refer to those biological activities attributable to the Fc region of an antibody, which vary with the antibody isotype. Examples of antibody effector functions include: C1q binding and complement dependent cytotoxicity (CDC); Fc receptor binding; antibody-dependent cell-mediated cytotoxicity (ADCC); phagocytosis; down regulation of cell surface receptors (e.g. B cell receptor); and B cell activation.

[0038] An “effective amount” of an agent, e.g., a pharmaceutical formulation, refers to an amount effective, at dosages and for periods of time necessary, to achieve the desired therapeutic or prophylactic result.

[0039] The term “Fc region” herein is used to define a C-terminal region of an immunoglobulin heavy chain that contains at least a portion of the constant region. The term includes native sequence Fc regions and variant Fc regions. In some embodiments, a human IgG heavy chain Fc region extends from Cys226, or from Pro230, to the carboxyl-terminus of the heavy chain. However, the C-terminal lysine (Lys447) of the Fc region may or may not be present (numbering in this paragraph is according to the EU numbering system, also called the EU index, as described in Kabat et al., Sequences of Proteins of Immunological Interest, 5th Ed. Public Health Service, National Institutes of Health, Bethesda, M D, 1991).

[0040] “Framework,” “framework region,” or “FR” refers to variable domain residues other than hypervariable region (HVR) residues. The FR of a variable domain generally consists of four FR domains: FR1, FR2, FR3, and FR4. Accordingly, the HVR and FR sequences generally appear in the following sequence in VH (or VL): FR1-H1(L1)-FR2-H2(L2)-FR3-H3(L3)-FR4.

[0041] The terms “full length antibody,” “intact antibody,” and “whole antibody” are used herein interchangeably to refer to an antibody having a structure substantially similar to a native antibody structure or having heavy chains that contain an Fc region as defined herein.

[0042] The terms “host cell,” “host cell line,” and “host cell culture” are used interchangeably and refer to cells into which exogenous nucleic acid has been introduced, including the progeny of such cells. Host cells include “transformants” and “transformed cells,” which include the primary transformed cell and progeny derived therefrom without regard to the number of passages. Progeny may not be completely identical in nucleic acid content to a parent cell, and may contain mutations. Mutant progeny that have the same function or biological activity as screened or selected for in the originally transformed cell are included herein.

[0043] A “human antibody” is one which possesses an amino acid sequence which corresponds to that of an antibody produced by a human or a human cell or derived from a non-human source that utilizes human antibody repertoires or other human antibody-encoding sequences. This definition of a human antibody specifically excludes a humanized antibody comprising non-human antigen-binding residues.

[0044] The term “variable region” or “variable domain” refers to the domain of an antibody heavy or light chain that is involved in binding the antibody to antigen. The variable domains of the heavy chain and light chain (VH and VL, respectively) of a native antibody generally have similar structures, with each domain comprising four conserved framework regions (FRs) and three hypervariable regions (HVRs). (See, e.g., Kindt et al. Kuby Immunology, 6^{th} ed., W.H. Freeman and Co., page 91 (2007).) A single VH or VL domain may be sufficient to confer antigen-binding specificity. Furthermore, antibodies that bind a particular antigen may be isolated using a VH or VL domain from an antibody that binds the antigen to screen a library of complementary VL or VH domains, respectively. See. e.g., Portolano et al., J. Immunol. 150:880-887 (1993); Clarkson et al., Nature 352:624-628 (1991).

[0045] A “human consensus framework” is a framework which represents the most commonly occurring amino acid residues in a selection of human immunoglobulin VL or VH framework sequences. Generally, the selection of human immunoglobulin VL or VH sequences is from a subgroup of variable domain sequences. Generally, the subgroup of sequences is a subgroup as in Kabat et al., Sequences of Proteins of Immunological Interest, Fifth Edition, NIH Publication 91-3242, Bethesda MD (1991), vols. 1-3. In some embodiments, for the VL, the subgroup is subgroup kappa I as in Kabat et al., supra. In some embodiments, for the VH, the subgroup is subgroup III as in Kabat et al., supra.

[0046] The term “hypervariable region” or “HVR” as used herein refers to each of the regions of an antibody variable domain which are hypervariable in sequence (“complementarity determining regions” or “CDRs”) and/or form structurally defined loops (“hypervariable loops”) and/or contain the antigen-contacting residues (“antigen contacts”). Generally, antibodies comprise six HVRs: three in the VH (H1, H2, H3), and three in the VL (L1, L2, L3).

[0047] In some embodiments, an antibody is provided according to the Table of Sequences, wherein the isotype is human IgG1. In some embodiments, an antibody is provided according to the Table of Sequences, wherein the isotype is human IgG4. In some embodiments, an antibody is provided according to the Table of Sequences, wherein the isotype is human IgG4, wherein there is a single mutation at serine 228 to proline (S228P). In some embodiments, an antibody is provided according to the Table of Sequences, wherein the isotype is human IgG4, wherein there are two mutations at serine 228 to proline (S228P) and leucine 235 to glutamate (L235E). Sequences for the human IgG1 and IgG4 are shown in the Sequence Table at SEQ ID Nos: 40000 and 40001, respectively. Sequences for human IgG4 with one or two mutations are shown in 40002 and 40003, respectively. Throughout, where an antibody or clone number is provided, the antibody is in the IgG1 format. If the antibody or clone number is appended with a “0.4”, for example. “Clone 35.4”, the antibody is an IgG4 antibody having a constant region comprising SEQ ID NO: 40002. The S228P mutation occurs at position 228 in the literature. The S→P mutation occurs in clone 35.4 may be at position 229 but is still referred to herein as S228P. In general, all exemplified antibodies described herein comprise the human kappa light chain.

[0048] An “immunoconjugate” is an antibody conjugated to one or more heterologous molecule(s), including but not limited to a cytotoxic agent.

[0049] An “individual” or “subject” is a mammal. Mammals include, but are not limited to, domesticated animals (e.g., cows, sheep, cats, dogs, and horses), primates (e.g., humans and non-human primates such as monkeys), rabbits, and rodents (e.g., mice and rats). In certain embodiments, the individual or subject is a human.

[0050] An “isolated” antibody is one which has been separated from a component of its natural environment. In some embodiments, an antibody is purified to greater than 95% or 99% purity as determined by, for example, electrophoretic (e.g., SDS-PAGE, isoelectric focusing (IEF), capillary electrophoresis) or chromatographic (e.g., ion exchange or reverse phase HPLC). For review of methods for assessment of antibody purity, see, e.g., Flatman et al., J. Chromatogr. B 848: 79-87 (2007).

[0051] The term “monoclonal antibody” as used herein refers to an antibody obtained from a population of substantially homogeneous antibodies, i.e., the individual antibodies comprising the population are identical and/or bind the same epitope, except for possible variant antibodies, e.g., containing naturally occurring mutations or arising during production of a monoclonal antibody preparation, such variants generally being present in minor amounts. In contrast to polyclonal antibody preparations, which typically include different antibodies directed against different determinants (epitopes), each monoclonal antibody of a monoclonal antibody preparation is directed against a single determinant on an antigen. Thus, the modifier “monoclonal” indicates the character of the antibody as being obtained from a substantially homogeneous population of antibodies and is not to be construed as requiring production of the antibody by any particular method. For example, the monoclonal antibodies to be used in accordance with the present invention may be made by a variety of techniques, including but not limited to the hybridoma method, recombinant DNA methods, phage-display methods, and methods utilizing transgenic animals containing all or part of the human immunoglobulin loci, such methods and other exemplary methods for making monoclonal antibodies being described herein.

[0052] A “naked antibody” refers to an antibody that is not conjugated to a heterologous moiety (e.g., a cytotoxic moiety) or radiolabel. The naked antibody may be present in a pharmaceutical formulation.

[0053] “Native antibodies” refer to naturally occurring immunoglobulin molecules with varying structures. For example, native IgG antibodies are heterotetrameric glycoproteins of about 150,000 daltons, composed of two identical light chains and two identical heavy chains that are disulfide-bonded. From N- to C-terminus, each heavy chain has a variable region (VH), also called a variable heavy domain or a heavy chain variable domain, followed by three constant domains (CH1, CH2, and CH3). Similarly, from N- to C-terminus, each light chain has a variable region (VL), also called a variable light domain or a light chain variable domain, followed by a constant light (CL) domain. The light chain of an antibody may be assigned to one of two types, called kappa (κ) and lambda (λ), based on the amino acid sequence of its constant domain.

[0054] “Percent (%) amino acid sequence identity” with respect to a reference polypeptide sequence is defined as the percentage of amino acid residues in a candidate sequence that are identical with the amino acid residues in the reference polypeptide sequence, after aligning the sequences and introducing gaps, if necessary, to achieve the maximum percent sequence identity, and not considering any conservative substitutions as part of the sequence identity. Alignment for purposes of determining percent amino acid sequence identity can be achieved in various ways that are within the skill in the art, for instance, using publicly available computer software such as BLAST, BLAST-2, ALIGN or Megalign (DNASTAR) software. Those skilled in the art can determine appropriate parameters for aligning sequences, including any algorithms needed to achieve maximal alignment over the full length of the sequences being compared. For purposes herein, however, % amino acid sequence identity values are generated using the sequence comparison computer program ALIGN-2. The ALIGN-2 sequence comparison computer program was authored by Genentech, Inc., and the source code has been filed with user documentation in the U.S. Copyright Office, Washington D.C., 20559, where it is registered under U.S. Copyright Registration No. TXU510087. The ALIGN-2 program is publicly available from Genentech, Inc., South San Francisco, California, or may be compiled from the source code. The ALIGN-2 program should be compiled for use on a UNIX operating system, including digital UNIX V4.0D. All sequence comparison parameters are set by the ALIGN-2 program and do not vary.

[0055] In situations where ALIGN-2 is employed for amino acid sequence comparisons, the % amino acid sequence identity of a given amino acid sequence A to, with, or against a given amino acid sequence B (which can alternatively be phrased as a given amino acid sequence A that has or comprises a certain % amino acid sequence identity to, with, or against a given amino acid sequence B) is calculated as follows:

100 times the fraction X/Y

where X is the number of amino acid residues scored as identical matches by the sequence alignment program ALIGN-2 in that program's alignment of A and B, and where Y is the total number of amino acid residues in B. It will be appreciated that where the length of amino acid sequence A is not equal to the length of amino acid sequence B, the % amino acid sequence identity of A to B will not equal the % amino acid sequence identity of B to A. Unless specifically stated otherwise, all % amino acid sequence identity values used herein are obtained as described in the immediately preceding paragraph using the ALIGN-2 computer program.

[0056] The term “pharmaceutical formulation” or “pharmaceutical composition” refers to a preparation which is in such form as to permit the biological activity of an active ingredient contained therein to be effective, and which contains no additional components which are unacceptably toxic to a subject to which the formulation would be administered.

[0057] A “pharmaceutically acceptable carrier” refers to an ingredient in a pharmaceutical formulation or composition, other than an active ingredient, which is nontoxic to a subject. A pharmaceutically acceptable carrier includes, but is not limited to, a buffer, excipient, stabilizer, or preservative.

[0058] As used herein, “treatment” (and grammatical variations thereof such as “treat” or “treating”) refers to clinical intervention in an attempt to alter the natural course of the individual being treated and can be performed either for prophylaxis or during the course of clinical pathology. Desirable effects of treatment include, but are not limited to, preventing occurrence or recurrence of disease, alleviation of symptoms, diminishment of any direct or indirect pathological consequences of the disease, preventing metastasis, decreasing the rate of disease progression, amelioration or palliation of the disease state, and remission or improved prognosis. In some embodiments, antibodies of the invention are used to delay development of a disease or to slow the progression of a disease.

[0059] The term “vector,” as used herein, refers to a nucleic acid molecule capable of propagating another nucleic acid to which it is linked. The term includes the vector as a self-replicating nucleic acid structure as well as the vector incorporated into the genome of a host cell into which it has been introduced. Certain vectors are capable of directing the expression of nucleic acids to which they are operatively linked. Such vectors are referred to herein as “expression vectors.”

### II. Compositions and Methods

[0060] Compositions for use in methods of simultaneously engaging, coupling, or binding CD16 and CD112R are provided. In some embodiments, methods for treating cancer are encompassed comprising administering one or more compositions that are capable of simultaneously coupling, engaging, and/or binding to CD112R and CD16. In some embodiments, the composition comprises one agent that is capable of simultaneous binding. In some embodiments, the composition comprises more than one agent that simultaneously binds by virtue of its simultaneous or near simultaneous administration.

[0061] In some embodiments, the composition is a multispecific antibody that binds to CD112R and CD16. In some embodiments, the composition comprises two agents, wherein one agent engages, couples, or binds CD112R and the other agent engages, couples, or binds CD16.

[0062] In some embodiments, compositions for use in a method of
[0063] a) treating cancer by preferentially activating NK cells; and/or
[0064] b) enhancing NK cell activation; and/or
[0065] c) enhancing NK cell activation and not enhancing T cell activation, are provided, comprising administering a composition that engages, couples, or binds CD16 and CD112R.

[0066] In some embodiments, the composition is a multispecific antibody, wherein the antibody binds to, blocks and/or activates CD16 and CD112R.

[0067] In some embodiments, the composition comprises a CD16 agonist and an agent that binds to and/or activates CD112R.

[0068] In some embodiments, the composition comprises an anti-CD16 antibody.

[0069] In some embodiments, the composition comprises an anti-CD112R antibody.

[0070] In some embodiments, the composition comprises an anti-CD16 antibody and an anti-CD112R antibody.

### 1. Multispecific Antibodies

[0071] In certain embodiments, an antibody provided herein is a multispecific antibody, e.g. a bispecific antibody. Multispecific antibodies are monoclonal antibodies that have binding specificities for at least two different sites. In certain embodiments, one of the binding specificities is for CD112R and the other is for CD16. In certain embodiments, one of the binding specificities is for CD112R, one is for CD16, and another is selected independently from or more of PD-1, PD-L1, CTLA-4, Lag-3, TIM-3, TIGIT, CD96, PVRL1, PVRL2, PVRL3, PVRL4, CD155, STING, CD47, CD39, and IL-27. Bispecific antibodies may also be used to localize cytotoxic agents to cells which express CD112R. Bispecific antibodies can be prepared as full-length antibodies or antibody fragments.

[0072] Techniques for making multispecific antibodies include, but are not limited to, recombinant co-expression of two immunoglobulin heavy chain-light chain pairs having different specificities (see Milstein and Cuello, Nature 305: 537 (1983)), WO 93/08829, and Traunecker et al., EMBO J. 10: 3655 (1991)), and “knob-in-hole” engineering (see, e.g., U.S. Pat. No. 5,731,168). Multi-specific antibodies may also be made by engineering electrostatic steering effects for making antibody Fc-heterodimeric molecules (WO 2009/089004A1): cross-linking two or more antibodies or fragments (see, e.g., U.S. Pat. No. 4,676,980, and Brennan et al., Science, 229: 81 (1985)): using leucine zippers to produce bi-specific antibodies (see, e.g., Kostelny et al., J. Immunol., 148(5): 1547-1553 (1992)): using “diabody” technology for making bispecific antibody fragments (see, e.g., Hollinger et al., Proc. Natl. Acad. Sci. USA, 90:6444-6448 (1993)); and using single-chain Fv (sFv) dimers (see, e.g. Gruber et al., J. Immunol., 152:5368 (1994)); and preparing trispecific antibodies as described, e.g., in Tutt et al. J. Immunol. 147: 60 (1991).

[0073] Engineered antibodies with three or more functional antigen binding sites, including “Octopus antibodies,” are also included herein (see, e.g. US 2006/0025576A1).

[0074] The antibody or fragment herein also includes a “Dual Acting Fantibody” or “DAF” comprising an antigen binding site that binds to CD112R as well as another, different antigen (see, US 2008/0069820, for example).

### 2. Fc Region Variants

[0075] In certain embodiments, one or more amino acid modifications may be introduced into the Fc region of an antibody provided herein, thereby generating an Fc region variant. The Fc region variant may comprise a human Fc region sequence (e.g., a human IgG1, IgG2, IgG3 or IgG4 Fc region) comprising an amino acid modification (e.g. a substitution) at one or more amino acid positions.

[0076] In certain embodiments, the invention contemplates an antibody variant that possesses some but not all effector functions, which make it a desirable candidate for applications in which the half life of the antibody in vivo is important yet certain effector functions (such as complement and ADCC) are unnecessary or deleterious. In vitro and/or in vivo cytotoxicity assays can be conducted to confirm the reduction/depletion of CDC and/or ADCC activities. For example, Fc receptor (FcR) binding assays can be conducted to ensure that the antibody lacks FcγR binding (hence likely lacking ADCC activity), but retains FcRn binding ability. The primary cells for mediating ADCC, NK cells, express FcγRIII only, whereas monocytes express FcγRI, FcγRII and FcγRIII. FR expression on hematopoietic cells is summarized in Table 3 on page 464 of Ravetch and Kinet, Annu. Rev. Immunol. 9:457-492 (1991). Non-limiting examples of in vitro assays to assess ADCC activity of a molecule of interest is described in U.S. Pat. No. 5,500,362 (see, e.g. Hellstrom, I. et al. Proc. Nat'l Acad. Sci. USA 83:7059-7063 (1986)) and Hellstrom, I et al., Proc. Natl Acad. Sci. USA 82:1499-1502 (1985): 5,821,337 (see Bruggemann, M. et al., J. Exp. Med. 166:1351-1361 (1987)). Alternatively, non-radioactive assays methods may be employed (see, for example, ACTI™ non-radioactive cytotoxicity assay for flow cytometry (CellTechnology, Inc. Mountain View, CA; and CytoTox 96® non-radioactive cytotoxicity assay (Promega, Madison, WI). Useful effector cells for such assays include peripheral blood mononuclear cells (PBMC) and Natural Killer (NK) cells. Alternatively, or additionally, ADCC activity of the molecule of interest may be assessed in vivo, e.g., in an animal model such as that disclosed in Clynes et al. Proc. Natl Acad. Sci. USA 95:652-656 (1998). C1q binding assays may also be carried out to confirm that the antibody is unable to bind C1q and hence lacks CDC activity. See, e.g., C1q and C3c binding ELISA in WO 2006/029879 and WO 2005/100402. To assess complement activation, a CDC assay may be performed (see, for example, Gazzano-Santoro et al., J. Immunol. Methods 202:163 (1996); Cragg, M. S. et al., Blood 101:1045-1052 (2003); and Cragg. M. S, and M. J. Glennie, Blood 103:2738-2743 (2004)). FcRn binding and in vivo clearance/half life determinations can also be performed using methods known in the art (see, e.g., Petkova, S. B. et al., Int'l. Immunol. 18(12): 1759-1769 (2006)).

[0077] Antibodies with reduced effector function include those with substitution of one or more of Fc region residues 238, 265, 269, 270, 297, 327 and 329 (U.S. Pat. No. 6,737,056). Such Fc mutants include Fc mutants with substitutions at two or more of amino acid positions 265, 269, 270, 297 and 327, including the so-called “DANA” Fc mutant with substitution of residues 265 and 297 to alanine (U.S. Pat. No. 7,332,581).

[0078] Certain antibody variants with improved or diminished binding to FcRs are described. (See, e.g., U.S. Pat. No. 6,737,056; WO 2004/056312, and Shields et al., J. Biol. Chem. 9(2): 6591-6604 (2001).)

[0079] In certain embodiments, an antibody variant comprises an Fc region with one or more amino acid substitutions which improve ADCC, e.g., substitutions at positions 298, 333, and/or 334 of the Fc region (EU numbering of residues).

[0080] In some embodiments, alterations are made in the Fc region that result in altered (i.e., either improved or diminished) C1q binding and/or Complement Dependent Cytotoxicity (CDC), e.g., as described in U.S. Pat. No. 6,194,551, WO 99/51642, and Idusogie et al. J. Immunol. 164: 4178-4184 (2000).

[0081] Antibodies with increased half lives and improved binding to the neonatal Fc receptor (FcRn), which is responsible for the transfer of maternal IgGs to the fetus (Guyer et al., J. Immunol. 117:587 (1976) and Kim et al., J. Immunol. 24:249 (1994)), are described in US2005/0014934A1 (Hinton et al.). Those antibodies comprise an Fc region with one or more substitutions therein which improve binding of the Fc region to FcRn. Such Fc variants include those with substitutions at one or more of Fc region residues: 238, 252, 254, 256, 265, 272, 286, 303, 305, 307, 311, 312, 317, 340, 356, 360, 362, 376, 378, 380, 382, 413, 424 or 434, e.g., substitution of Fc region residue 434 (e.g., U.S. Pat. No. 7,371,826).

[0082] See also Duncan & Winter, Nature 322:738-40 (1988): U.S. Pat. Nos. 5,648,260; 5,624,821; and WO 94/29351 concerning other examples of Fc region variants.

[0083] In some embodiments, an antibody is provided according to the Table of Sequences, wherein the isotype is human IgG1. In some embodiments, an antibody is provided according to the Table of Sequences, wherein the isotype is human IgG4. In some embodiments, an antibody is provided according to the Table of Sequences, wherein the isotype is human IgG4, wherein there is a single mutation at serine 228 to proline (S228P).

### 3. Antibody Derivatives

[0084] In certain embodiments, an antibody provided herein may be further modified to contain additional nonproteinaceous moieties that are known in the art and readily available. The moieties suitable for derivatization of the antibody include but are not limited to water soluble polymers. Non-limiting examples of water soluble polymers include, but are not limited to, polyethylene glycol (PEG), copolymers of ethylene glycol/propylene glycol, carboxy methylcellulose, dextran, polyvinyl alcohol, polyvinyl pyrrolidone, poly-1,3-dioxolane, poly-1,3,6-trioxane, ethylene/maleic anhydride copolymer, polyaminoacids (either homopolymers or random copolymers), and dextran or poly(n-vinyl pyrrolidone)polyethylene glycol, propropylene glycol homopolymers, prolypropylene oxide/ethylene oxide co-polymers, polyoxyethylated polyols (e.g., glycerol), polyvinyl alcohol, and mixtures thereof. Polyethylene glycol propionaldehyde may have advantages in manufacturing due to its stability in water. The polymer may be of any molecular weight and may be branched or unbranched. The number of polymers attached to the antibody may vary, and if more than one polymer is attached, they can be the same or different molecules. In general, the number and/or type of polymers used for derivatization can be determined based on considerations including, but not limited to, the particular properties or functions of the antibody to be improved, whether the antibody derivative will be used in a therapy under defined conditions, etc.

[0085] In another embodiment, conjugates of an antibody and nonproteinaceous moiety that may be selectively heated by exposure to radiation are provided. In some embodiments, the nonproteinaceous moiety is a carbon nanotube (Kam et al., Proc. Natl. Acad. Sci. USA 102: 11600-11605 (2005)). The radiation may be of any wavelength, and includes, but is not limited to, wavelengths that do not harm ordinary cells, but which heat the nonproteinaceous moiety to a temperature at which cells proximal to the antibody-nonproteinaceous moiety are killed.

### B. Pharmaceutical Formulations

[0086] Pharmaceutical formulations of the described compositions are provided and may be used in the methods described herein. In some embodiments, the formulations are prepared by mixing the active ingredient so that it has the desired degree of purity with one or more optional pharmaceutically acceptable carriers, diluents, and/or excipients (Remington's Pharmaceutical Sciences 16th edition, Osol, A. Ed. (1980)), in the form of lyophilized formulations or aqueous solutions. Pharmaceutically acceptable carriers, diluents, and excipients are generally nontoxic to recipients at the dosages and concentrations employed, and include, but are not limited to: sterile water, buffers such as phosphate, citrate, and other organic acids; antioxidants including ascorbic acid and methionine; preservatives (such as octadecyldimethylbenzyl ammonium chloride; hexamethonium chloride; benzalkonium chloride; benzethonium chloride; phenol, butyl or benzyl alcohol; alkyl parabens such as methyl or propyl paraben; catechol; resorcinol; cyclohexanol; 3-pentanol; and m-cresol); low molecular weight (less than about 10 residues) polypeptides; proteins, such as serum albumin, gelatin, or immunoglobulins; hydrophilic polymers such as polyvinylpyrrolidone; amino acids such as glycine, glutamine, asparagine, histidine, arginine, or lysine; monosaccharides, disaccharides, and other carbohydrates including glucose, mannose, or dextrins; chelating agents such as EDTA; sugars such as sucrose, mannitol, trehalose or sorbitol; salt-forming counter-ions such as sodium; metal complexes (e.g. Zn-protein complexes); and/or non-ionic surfactants such as polyethylene glycol (PEG). Exemplary pharmaceutically acceptable carriers herein further include insterstitial drug dispersion agents such as soluble neutral-active hyaluronidase glycoproteins (sHASEGP), for example, human soluble PH-20 hyaluronidase glycoproteins, such as rHuPH20 (HYLENEX®, Baxter International, Inc.). Certain exemplary sHASEGPs and methods of use, including rHuPH20, are described in US Patent Publication Nos. 2005/0260186 and 2006/0104968. In one aspect, a sHASEGP is combined with one or more additional glycosaminoglycanases such as chondroitinases.

[0087] Exemplary lyophilized antibody formulations are described in U.S. Pat. No. 6,267,958. Aqueous antibody formulations include those described in U.S. Pat. No. 6,171,586 and WO2006/044908, the latter formulations including a histidine-acetate buffer.

[0088] The formulation or composition herein may also contain more than one active ingredients as necessary for the particular indication being treated, preferably those with complementary activities that do not adversely affect each other. Such active ingredients are suitably present in combination in amounts that are effective for the purpose intended.

[0089] Active ingredients may be entrapped in microcapsules prepared, for example, by coacervation techniques or by interfacial polymerization, for example, hydroxy methylcellulose or gelatin-microcapsules and poly-(methylmethacylate) microcapsules, respectively, in colloidal drug delivery systems (for example, liposomes, albumin microspheres, microemulsions, nano-particles and nanocapsules) or in macroemulsions. Such techniques are disclosed in Remington's Pharmaceutical Sciences 16th edition, Osol, A. Ed. (1980).

[0090] Sustained-release preparations may be prepared. Suitable examples of sustained-release preparations include semipermeable matrices of solid hydrophobic polymers containing the antibody, which matrices are in the form of shaped articles, e.g. films, or microcapsules.

[0091] The formulations or compositions to be used for in vivo administration are generally sterile. Sterility may be readily accomplished, e.g., by filtration through sterile filtration membranes.

### C. Therapeutic Uses and Methods

[0092] Compositions for use in methods of simultaneously engaging, coupling, or binding CD16 and CD112R are provided. In some embodiments, methods for treating cancer are encompassed comprising administering one or more compositions that are capable of simultaneously coupling, engaging, and/or binding to CD112R and CD16. In some embodiments, the composition comprises one agent that is capable of simultaneous binding. In some embodiments, the composition comprises more than one agent that simultaneously binds by virtue of its simultaneous or near simultaneous administration.

[0093] In some embodiments, the composition is a multispecific antibody that binds to CD112R and CD16. In some embodiments, the composition comprises two agents, wherein one agent engages, couples, or binds CD112R and the other agent engages, couples, or binds CD16.

[0094] In some embodiments, compositions for use in a method of
[0095] a) treating cancer by preferentially activating NK cells; and/or
[0096] b) enhancing NK cell activation; and/or
[0097] c) enhancing NK cell activation and not enhancing T cell activation,

[0098] are provided, comprising administering a composition that engages, couples, or binds CD16 and CD112R.

[0099] In further aspects, the invention provides methods for treating diseases and/or disorders where blocking CD112R are desired. In some embodiments, methods for enhancing, increasing and/or sustaining an anti-tumor immune response in a subject having a tumor are provided comprising administering an agent or agent the couples, engages, or blocks CD16 and CD112R. In some embodiments, the tumor is cancerous. In some embodiments, methods for treating cancer in a subject having cancer are provided comprising administering an agent or agent the couples, engages, or blocks CD16 and CD112R.

[0100] The compositions described herein may be used, for example, for treating cancer. In some embodiments, methods for treating cancer are provided, comprising administering an effective amount of a CD16 and CD112R engaging, coupling, or binding composition or compositions.

[0101] Cancers can be cancers with solid tumors or blood malignancies (e.g., liquid tumors).

[0102] Non-limiting examples of cancers for treatment include squamous cell carcinoma, small-cell lung cancer, non-small cell lung cancer, squamous non-small cell lung cancer (NSCLC), nonsquamous NSCLC, glioma, gastrointestinal cancer, renal cancer (e.g., clear cell carcinoma), ovarian cancer, liver cancer, colorectal cancer, endometrial cancer, kidney cancer (e.g., renal cell carcinoma (RCC)), prostate cancer (e.g., hormone refractory prostate adenocarcinoma), thyroid cancer, neuroblastoma, pancreatic cancer, glioblastoma (glioblastoma multiforme), cervical cancer, stomach cancer, bladder cancer, hepatoma, breast cancer, colon carcinoma, and head and neck cancer (or carcinoma), gastric cancer, germ cell tumor, pediatric sarcoma, sinonasal natural killer, melanoma (e.g., metastatic malignant melanoma, such as cutaneous or intraocular malignant melanoma), bone cancer, skin cancer, uterine cancer, cancer of the anal region, testicular cancer, carcinoma of the fallopian tubes, carcinoma of the endometrium, carcinoma of the cervix, carcinoma of the vagina, carcinoma of the vulva, cancer of the esophagus, cancer of the small intestine, cancer of the endocrine system, cancer of the parathyroid gland, cancer of the adrenal gland, sarcoma of soft tissue, cancer of the urethra, cancer of the penis, solid tumors of childhood, cancer of the ureter, carcinoma of the renal pelvis, neoplasm of the central nervous system (CNS), primary CNS lymphoma, tumor angiogenesis, spinal axis tumor, brain cancer, brain stem glioma, pituitary adenoma, Kaposi's sarcoma, epidermoid cancer, squamous cell cancer, T cell lymphoma, environmentally-induced cancers including those induced by asbestos, virus-related cancers or cancers of viral origin (e.g., human papilloma virus (HPV-related or -originating tumors)), and hematologic malignancies derived from either of the two major blood cell lineages. i.e., the myeloid cell line (which produces granulocytes, erythrocytes, thrombocytes, macrophages and mast cells) or lymphoid cell line (which produces B. T. NK and plasma cells), such as all types of leukemias, lymphomas, and myelomas, e.g., acute, chronic, lymphocytic and/or myelogenous leukemias, such as acute leukemia (ALL), acute myelogenous leukemia (AML), chronic lymphocytic leukemia (CLL), and chronic myelogenous leukemia (CML), undifferentiated AML (MO), myeloblastic leukemia (Ml), myeloblastic leukemia (M2: with cell maturation), promyelocytic leukemia (M3 or M3 variant [M3V]), myelomonocytic leukemia (M4 or M4 variant with eosinophilia [M4E]), monocytic leukemia (M5), erythroleukemia (M6), megakaryoblastic leukemia (M7), isolated granulocytic sarcoma, and chloroma: lymphomas, such as Hodgkin's lymphoma (HL), non-Hodgkin's lymphoma (NHL). B cell hematologic malignancy, e.g., B cell lymphomas, T cell lymphomas, lymphoplasmacytoid lymphoma, monocytoid B-cell lymphoma, mucosa-associated lymphoid tissue (MALT) lymphoma, anaplastic (e.g., Ki 1+) large-cell lymphoma, adult T cell lymphoma/leukemia, mantle cell lymphoma, angio immunoblastic T cell lymphoma, angiocentric lymphoma, intestinal T cell lymphoma, primary mediastinal B-cell lymphoma, precursor T-lymphoblastic lymphoma, T-lymphoblastic; and lymphoma/leukaemia (T-Lbly/T-ALL), peripheral T cell lymphoma, lymphoblastic lymphoma, post-transplantation lymphoproliferative disorder, true histiocytic lymphoma, primary central nervous system lymphoma, primary effusion lymphoma. B cell lymphoma, lymphoblastic lymphoma (LBL), hematopoietic tumors of lymphoid lineage, acute lymphoblastic leukemia, diffuse large B-cell lymphoma. Burkitt's lymphoma, follicular lymphoma, diffuse histiocytic lymphoma (DHL), immunoblastic large cell lymphoma, precursor B-lymphoblastic lymphoma, cutaneous T cell lymphoma (CTLC) (also called mycosis fungoides or Sezary syndrome), and lymphoplasmacytoid lymphoma (LPL) with Waldenstrom's macroglobulinemia; myelomas, such as IgG myeloma, light chain myeloma, nonsecretory myeloma, smoldering myeloma (also called indolent myeloma), solitary plasmocytoma, and multiple myelomas, chronic lymphocytic leukemia (CLL), hairy cell lymphoma; hematopoietic tumors of myeloid lineage, tumors of mesenchymal origin, including fibrosarcoma and rhabdomyoscarcoma; seminoma, teratocarcinoma, tumors of the central and peripheral nervous, including astrocytoma, schwannomas; tumors of mesenchymal origin, including fibrosarcoma, rhabdomyoscaroma, and osteosarcoma; and other tumors, including melanoma, xeroderma pigmentosum, keratoacanthoma, seminoma, thyroid follicular cancer and teratocarcinoma, hematopoietic tumors of lymphoid lineage, for example T cell and B cell tumors, including but not limited to T cell disorders such as T-prolymphocytic leukemia (T-PLL), including of the small cell and cerebriform cell type: large granular lymphocyte leukemia (LGL) of the T cell type: a/d T-NHL hepatosplenic lymphoma: peripheral/post-thymic T cell lymphoma (pleomorphic and immunoblastic subtypes): angiocentric (nasal) T cell lymphoma: cancer of the head or neck, renal cancer, rectal cancer, cancer of the thyroid gland: acute myeloid lymphoma, as well as any combinations of said cancers. The methods described herein can also be used for treatment of metastatic cancers, unresectable, refractory cancers (e.g., cancers refractory to previous immunotherapy, e.g., with a blocking CTLA-4 or PD-1 antibody), and/or recurrent cancers.

[0103] In certain embodiments, a composition described herein is administered to subjects having a cancer that has exhibited an inadequate response to, or progressed on, a prior treatment, e.g., a prior treatment with an immuno-oncology or immunotherapy drug. In some embodiments, the cancer is refractory or resistant to a prior treatment, either intrinsically refractory or resistant (e.g., refractory to a PD-1 pathway antagonist), or a resistance or refractory state is acquired. For example, a composition described herein may be administered to subjects who are not responsive or not sufficiently responsive to a first therapy or who have disease progression following treatment, e.g., anti-PD-1 pathway antagonist treatment, either alone or in combination with another therapy (e.g., with an anti-PD-1 pathway antagonist therapy). In other embodiments, a composition described herein is administered to subjects who have not previously received (i.e., been treated with) an immuno-oncology agent, e.g., a PD-1 pathway antagonist.

### D. Combinations

[0104] Compositions of the invention can be used either alone or in combination with other agents in a therapy. For instance, a composition of the invention may be co-administered with at least one additional therapeutic agent (e.g., further comprising administering a second therapy).

[0105] In some embodiments, targeting an additional independent inhibitory pathway or combinations thereof has the potential to lead to further enhanced immune cell activation beyond monotherapy.

[0106] In some embodiments, the additional therapeutic agent or second agent is a chemotherapeutic agent, an opsonizing agent, a regulatory T cell (“Treg”) depleting agent, an antagonist of a target other than CD112R, or an agonist of a target other than CD112R. In certain embodiments, the second agent is a chemotherapeutic agent described herein or any known chemotherapeutic agent. In some embodiments, the second agent is an opsonizing agent, wherein the opsonizing agent is an antibody other than an anti-CD112R antibody that targets cancer or tumor cells. In some embodiments, the second agent is a Treg depleting agent described herein or any known Treg depleting agent. In some embodiments, the second agent is an antagonist of a target other than CD112R. In some embodiments, the second agent is an agonist of a target other than CD112R.

[0107] In some instances, the second agent targets an independent inhibitory pathway, such as, for example, a pathway involving PD-1, PD-L1, CTLA-4, Lag-3 or TIM-3. In some embodiments, the second agent antagonizes one or more of PD-1, PD-L1, CTLA-4, Lag-3 and TIM-3. Suitable antagonists for use in the combination therapy described herein, include, without limitation, ligands, antibodies (e.g., monoclonal antibodies and bispecific antibodies), and multivalent agents. In one embodiment, the antagonist is a fusion protein, e.g., an Fc fusion protein, such as AMP-244. In some embodiments, the PD-1 antagonist is an anti-PD-1 or anti-PD-L1 antibody.

[0108] An exemplary anti-PD-1 antibody is nivolumab (BMS-936558) or an antibody that comprises the CDRs or variable regions of one of antibodies 17D8, 2D3, 4H1, 5C4, 7D3, 5F4 and 4A11 described in WO 2006/121168. In certain embodiments, an anti-PD-1 antibody is MK-3475 (Lambrolizumab) described in WO2012/145493; AMP-514 described in WO 2012/145493; or PDR001. Further known PD-1 antibodies and other PD-1 inhibitors include those described in WO 2009/014708, WO 03/099196, WO 2009/114335, WO 2011/066389, WO 2011/161699, WO 2012/145493, U.S. Pat. Nos. 7,635,757 and 8,217,149, and U.S. Patent Publication No. 2009/0317368. Any of the anti-PD-1 antibodies disclosed in WO2013/173223 can also be used. An anti-PD-1 antibody that competes for binding with, and/or binds to the same epitope on PD-1 as, as one of these antibodies can also be used in combination treatments.

[0109] In some embodiments, the anti-PD-L1 antibody useful for the combination therapy is BMS-936559 (referred to as 12A4 in WO 2007/005874 and U.S. Pat. No. 7,943,743), or an antibody that comprises the CDRs or variable regions of 3G10, 12A4, 10A5, 5F8, 10H10, 1B12, 7H1, 11E6, 12B7 and 13G4, which are described in PCT Publication WO 07/005874 and U.S. Pat. No. 7,943,743. In certain embodiment an anti-PD-L1 antibody is MEDI4736 (also known as durvalumab and Anti-B7-H1), MPDL3280A (also known as atezolizumab and RG7446), MSB0010718C (also known as avelumab; WO2013/79174), or rHigM12B7. Any of the anti-PD-L1 antibodies disclosed in WO2013/173223, WO2011/066389, WO2012/145493, U.S. Pat. Nos. 7,635,757 and 8,217,149 and U.S. Publication No. 2009/145493 can also be used. Anti-PD-L1 antibodies that compete with and/or bind to the same epitope as that of any of these antibodies can also be used in combination treatments.

[0110] In certain embodiments, the composition of the disclosure can be used with a CTLA-4 antagonist, e.g., an anti-CTLA-4 antibody. In one embodiment, an anti-CTLA-4 antibody is an antibody selected from the group of: Yervoy R: (ipilimumab or antibody 10DI, described in PCT Publication WO 01/14424), tremelimumab (formerly ticilimumab, CP-675,206), monoclonal or an anti-CTLA-4 antibody described in any of the following publications: WO 98/42752: WO 00/37504: U.S. Pat. No. 6,207,156; Hurwitz et al. (1998) Pro. Natl. Acad. Sci. USA 95(17): 10067-10071: Camacho et al. (2004) J. Clin. Oncology 22(145): antibodiestract No. 2505 (antibody CP-675206); and Mokyr et al. (1998) Cancer Res. 58:5301-5304. Any of the anti-CTLA-4 antibodies disclosed in WO2013/173223 can also be used.

[0111] In some embodiments, a composition of the disclosure is used in combination with a LAG-3 (also referred to herein and by others as LAG3) antagonist. Examples of anti-LAG3 antibodies include antibodies comprising the CDRs or variable regions of antibodies 25F7, 26H10, 25E3, 8B7, 11F2 or 17E5, which are described in U.S. Patent Publication No. US2011/0150892, WO10/19570 and WO2014/008218. In one embodiment, an anti-LAG-3 antibody is BMS-986016. Other art recognized anti-LAG-3 antibodies that can be used include IMP731 and IMP-321, described in US 2011/007023, WO08/132601, and WO09/44273. Anti-LAG-3 antibodies that compete with and/or bind to the same epitope as that of any of these antibodies can also be used in combination treatments.

[0112] In some embodiments, targeting two or more of TIGIT, CD96 and CD112R receptors simultaneously increases CD226 mediated signaling beyond the anti-CD112R monotherapy. Therefore, in some embodiments, the second agent is an antagonist of TIGIT and/or CD96. Suitable antagonists for use in the combination therapy described herein, include, without limitation, ligands, antibodies (e.g., monoclonal antibodies and bispecific antibodies), and multivalent agents.

[0113] In some embodiments, members of the PVR gene family are upregulated on tumor cells and can exhibit intrinsic tumor-promoting properties. Targeting additional members of the PVR gene family in combination with anti-CD112R antibodies leads to enhanced sensitivity to tumors beyond monotherapy. Therefore, in some embodiments, the second agent is selected from one or more of an antagonist of PVRL1, PVRL2, PVRL3, PVRL4, and CD155. Suitable antagonists for use in the combination therapy described herein, include, without limitation, ligands, antibodies (e.g., monoclonal antibodies and bispecific antibodies), and multivalent agents.

[0114] STING agonists induce innate immune cell activation resulting in increased T cell priming and recruitment of immune cells into the tumor microenvironment. Targeting STING agonists in combination with CD112R has the potential to lead to an even further increase in T cell and NK cell recruitment and activation.

[0115] Increased anti-CD47 antibody mediated phagocytosis can lead to an increase in the presentation of cancer derived antigens by macrophages to T cells. Combination treatment with an anti-CD47 antibody and an anti-CD112R antibody, such as an anti-CD112R antibody provided herein provides an opportunity to enhance cancer antigen specific T cell responses and is fully encompassed herein.

[0116] Adenosine, via adenosine receptors expressed on immune cells, inhibits T cell and NK cell activation. Anti-CD39 antibodies inhibit the generation of adenosine by preventing hydrolysis of adenosine triphosphate (ATP). Combination treatment with an anti-CD39 antibody and an anti-CD112R antibody, such as an anti-CD112R antibody provided herein, provides an opportunity to further enhance CD112R therapy by inhibiting adenosine mediated cell signaling in immune cells.

[0117] Cytokines can effectively modulate T cell and NK cell activation. IL-27 is an immunosuppressive cytokine that inhibits T cell and NK cell mediated responses. Anti-IL-27 antibodies provide an opportunity to enhance CD112R therapy by limiting immunosuppressive cytokine signaling in immune cells. Thus, combination treatment with an anti-IL-27 antibody and an anti-CD112R antibody, such as an anti-CD112R antibody provided herein, is provided.

[0118] The compositions herein may also be provided before, substantially contemporaneous with, or after other modes of treatment, for example, surgery, chemotherapy, radiation therapy, or the administration of a biologic, such as another therapeutic antibody. In some embodiments, the cancer has recurred or progressed following a therapy selected from surgery, chemotherapy, and radiation therapy, or a combination thereof. For example, a CD112R antibody as described herein could be administered as adjunctive therapy when there is a risk that micrometastases can be present and/or in order to reduce the risk of a relapse.

[0119] For treatment of cancer, the combinations may be administered in conjunction with one or more additional anti-cancer agents, such as a chemotherapeutic agent, growth inhibitory agent, anti-cancer vaccine such as a gene therapy vaccine, anti-angiogenesis agent and/or anti-neoplastic composition.

[0120] In some embodiments, an anti-inflammatory drug may be administered with the combination, such as a steroid or a non-steroidal anti-inflammatory drug (NSAID). In cases where it is desirable to render aberrantly proliferative cells quiescent in conjunction with or prior to treatment with CD112R antibodies described herein, hormones and steroids (including synthetic analogs), such as 17a-Ethinylestradiol, Diethylstilbestrol, Testosterone, Prednisone, Fluoxymesterone, Dromostanolone propionate, Testolactone, Megestrolacetate, Methylprednisolone, Methyl-testosterone, Prednisolone, Triamcinolone, Chlorotrianisene, Hydroxyprogesterone. Aminoglutethimide, Estramustine, Medroxyprogesteroneacetate, Leuprolide, Flutamide, Toremifene, ZOLADEX®, can also be administered to the subject. When employing the methods or compositions described herein, other agents used in the modulation of tumor growth or metastasis in a clinical setting, such as antimimetics, can also be administered as desired.

[0121] Such combination therapies noted above encompass combined administration (where two or more therapeutic agents are included in the same or separate formulations or compositions), and separate administration, in which case, administration of the antibody of the invention can occur prior to, simultaneously, and/or following, administration of the additional therapeutic agent or agents. In some embodiments, administration of the anti-CD112R antibody and administration of an additional therapeutic agent occur within about one month, or within about one, two or three weeks, or within about one, two, three, four, five, or six days, of each other.

[0122] A composition of the invention (and any additional therapeutic agent) can be administered by any suitable means, including parenteral, intrapulmonary, and intranasal, and, if desired for local treatment, intralesional administration. Parenteral infusions include intramuscular, intravenous, intraarterial, intraperitoneal, or subcutaneous administration. Dosing can be by any suitable route, e.g. by injections, such as intravenous or subcutaneous injections, depending in part on whether the administration is brief or chronic. Various dosing schedules including but not limited to single or multiple administrations over various time-points, bolus administration, and pulse infusion are contemplated herein.

[0123] Compositions of the invention can be formulated, dosed, and administered in a fashion consistent with good medical practice. Factors for consideration in this context include the particular disorder being treated, the particular mammal being treated, the clinical condition of the individual subject, the cause of the disorder, the site of delivery of the agent, the method of administration, the scheduling of administration, and other factors known to medical practitioners. As used herein, a “split dose” is the division of single unit dose or total daily dose into two or more doses, e.g., two or more administrations of the single unit dose. The composition may be administered as “split dose.”

[0124] The composition need not be but is optionally formulated with one or more agents currently used to prevent or treat the disorder in question. The effective amount of such other agents depends on the amount of composition present in the formulation or composition, the type of disorder or treatment, and other factors discussed above. These are generally used in the same dosages and with administration routes as described herein, or about from 1 to 99% of the dosages described herein, or in any dosage and by any route that is empirically/clinically determined to be appropriate. In some embodiments, the composition is provided in a formulation for immediate release and the other agent is formulated for extended release or vice versa.

### E. Articles of Manufacture

[0125] In another aspect of the invention, an article of manufacture containing materials useful for the treatment, prevention and/or diagnosis of the disorders described above is provided. The article of manufacture comprises a container and a label or package insert on or associated with the container. Suitable containers include, for example, bottles, vials, syringes, IV solution bags, etc. The containers may be formed from a variety of materials such as glass or plastic. The container holds a composition which is by itself or combined with another composition effective for treating, preventing and/or diagnosing the condition and may have a sterile access port (for example the container may be an intravenous solution bag or a vial having a stopper pierceable by a hypodermic injection needle). At least one active agent in the composition may be an antibody. The label or package insert indicates that the composition is used for treating the condition of choice. Moreover, the article of manufacture may comprise (a) a first container with a composition contained therein, wherein the composition comprises an antibody; and (b) a second container with a composition contained therein, wherein the composition comprises a further cytotoxic or otherwise therapeutic agent. The article of manufacture in this embodiment of the invention may further comprise a package insert indicating that the compositions can be used to treat a particular condition. Alternatively, or additionally, the article of manufacture may further comprise a second (or third) container comprising a pharmaceutically-acceptable buffer, such as bacteriostatic water for injection (BWFI), phosphate-buffered saline, Ringer's solution and dextrose solution. It may further include other materials desirable from a commercial and user standpoint, including other buffers, diluents, filters, needles, and syringes.

[0126] It is understood that any of the above articles of manufacture may include an immunoconjugate.

### III. EXAMPLES

### Example 1

[0127] CD112R is an inhibitory receptor that is expressed on NK cells and T cells. CD112R suppresses immune cell activation through its association with the cell adhesion molecule CD112 (PVRL2), a ligand expressed on tumor cells that it competes for with the activating receptor CD226. CD112 binding to CD112R induces downstream signaling via an immunoreceptor tyrosine based inhibitory motif (ITIM) in the cytoplasmic tail, resulting in dampened effector cell activation. FIG. 1A provides a schematic, and FIG. 1B provides CD112R expression data for NK and CD8+ T cells.

[0128] CD112R expression is upregulated on murine tumor infiltrating NK cells. See. FIG. 2. CD112R expression was evaluated on immune cell populations from the spleen and dissociated tumors in Balb/c mice implanted subcutaneously with CT-26 tumors by flow cytometry. CD112R expression is represented as fold over negative (isotype control).

[0129] FIG. 3A shows a model for the therapeutic activity of clone 35 on NK cells. By engaging both CD16 and CD112R, clone 35 treatment promotes antitumor activity. FIG. 3B exemplifies that anti-CD112R antibodies with enhanced Fc effector function (hIgG1 Fc. Clone 35. Clone 38 and Clone 44) result in stronger NK cell degranulation in tumor cell co-cultures than Fc effector function low antibodies (hIgG4 Fc. Clone 35.4. Clone 38.4 and Clone 44.4). In particular. FIG. 3B shows enhanced NK cell mediated degranulation in response to tumor cells in the presence of enhanced Fc effector function CD112R antibodies as compared to Fc effector function low CD112R antibodies. Human NK cells and Raji CD112 cells were co-cultured for four hours with CD107a PE antibody in the presence of CD112R antibodies with IgG1 or IgG4.1 (S228P) isotypes. After co-culture. NK cell degranulation was determined by frequency of NK cells that were CD107a positive.

[0130] In FIG. 4A, overexpression of CD112R inhibits Jurkat cell TCR mediated activation. Jurkat cells transduced with either CD112R-ires-GFP (Jurkat CD112R) or GFP control vector (Jurkat GFP) were cocultured with TCR stimulator cells expressing membrane bound anti-CD3 scFv and CD112 ligand for 24 hrs. Activation was measured by IL-2 secretion into the supernatant by ELISA.

[0131] In FIG. 4B, clone 35 treatment increased TCR mediated activation of Jurkat. CD112R cells. Jurkat cells overexpressing CD112R were cocultured with TCR stimulator cells (Raji cells transduced with membrane bound anti-CD3 scFv and CD112 ligand) in the presence of clone 35 or isotype control antibody for 24 hrs. Activation of Jurkat cells was measured by IL-2 secretion into the supernatant by ELISA.

[0132] FIG. 5A shows that clone 35 mediated NK cell activation is partially abrogated by CD16 blockade. PBMCs from a single donor were cocultured with K562 target cells, clone 35 and F(ab′)2 antibodies that block either CD16 (Ancell, Clone 3G8), CD32 (Ancell, Clone 7.3) or media alone for 24 hr. NK cell activation was assessed by upregulation of 4-1BB expression by flow cytometry.

[0133] FIG. 5B shows stronger tumor growth inhibition in mice treated with an anti-CD112R antibody with enhanced Fc effector function (mouse IgG2a, Clone 46) compared to the same antibody engineered with low Fc-effector function (mouse IgG1, Clone 46.mG1). Graph is a summary of 3 experiments, N=44-45 per group.

[0134] In vivo efficacy of CD112R blockade was evaluated in the CT26 syngeneic mouse tumor model following NK cell or CD8 T cell depletion. To deplete NK and CD8 T cells, mice were treated twice weekly for three weeks starting at randomization with Asialo-GM1 antibody (Biolegend: cat #146002: dose 100 uL/mouse: intraperitoneally) and anti-CD8a antibody (Bioxcell: cat #BE0085; 200 μg/mouse: intraperitoneally) respectively. BALB/cAnNTac female mice of 7 weeks of age (Taconic Biosciences, Catalog #BALB-F) were implanted subcutaneously in the right flank with 0.2×10⁶ CT26. WT (ATCC, Catalog #CRL-2638) in 0.1 mL 50% Geltrex (GIBCO, catalog #A1432-02) and 50% RPMI-1640 serum-free media (GIBCO, catalog #A10491-01). Mice with palpable tumors were randomized on day 4 post-implantation and treated intraperitoneally twice weekly for three weeks starting on the day of randomization with Clone 46 (anti-CD112R mouse IgG2a; 12.5 mg/kg: intraperitoneally). Tumor volumes were measured with a caliper every 2-3 days until tumors reached IACUC limit size (<2000 mm³). Tumor volume (mm³) was calculated as follows: width (mm)×[length (mm)]²×0.5. Results are presented in FIG. 6A. The graph depicts mean tumor volumes for each treatment group as a function of time. These results demonstrate that the therapeutic effect of anti-CD112R is significantly diminished following NK cell or CD8 T cell depletion.

[0135] Anti-tumor immunity was evaluated in anti-CD112R treated mice that exhibited complete responses from primary CT26. WT tumor challenges. For the primary challenge, BALB/cAnNTac female mice of 7 weeks of age (Taconic Biosciences, Catalog #BALB-F) were implanted subcutaneously in the right flank with 0.2×106 CT26. WT (ATCC, Catalog #CRL-2638) in 0.1 mL 50% Geltrex (GIBCO, catalog #A1432-02) and 50% RPMI-1640 serum-free media (GIBCO, catalog #A10491-01). Mice with palpable tumors were randomized on day 4 post-implantation and treated intraperitoneally twice weekly for three weeks starting on the day of randomization as follows in Table 1.

TABLE 1

| Group | Treatment | Dose (μg/mouse) |
|---|---|---|
| Isotype control | Mouse IgG2a | 500 |
| | isotype control | |
| Clone 46 | Anti-CD112R | 500 |
| | mouse IgG2a | |

[0136] Tumor volumes were measured with a caliper every 2-3 days until tumors reached IACUC limit size (<2000 mm3). Tumor volume (mm3) was calculated as follows: width (mm)×[length (mm)]2×0.5.

[0137] All Surviving mice at day 50 post implantation that lacked any discernable tumors were considered to be survivors/complete responders. Complete responder mice (n=8) from the anti-CD112R treated group were re-challenged via inoculation in the left flank with 1×10⁶ CT26. WT cells (ATCC, Catalog #CRL-2638) in 0.1 mL 50% Geltrex (GIBCO, catalog #A1432-02) and 50% RPMI-1640 serum-free media (GIBCO, catalog #A10491-01), a five-fold increase from the primary inoculation dose. As a control, age-matched naïve Balb/c female mice (n=5) were also similarly inoculated in the left flank with 1×106 CT26. WT cells in 0.1 mL 50% Geltrex and 50% RPMI-1640 serum-free media. Mice did not receive any further treatment. Tumor volumes were measured every 2-3 days until tumors reached IACUC limit size (<2000 mm3). Tumor volume (mm3) was calculated as follows: width (mm)×[length (mm)]2×0.5. Results are presented in FIG. 6B.

[0138] To assess the impact of CD112R antibodies on NK cell activation, clone 35 (hIgG1) and clone 35.4 (hIgG4) were evaluated in PBMC-tumor cell cocultures. Upregulation of CD137 (4-1BB), which has been previously established as a marker of NK cell activation (Baessler et al. (2010) Blood 115(15): André et al. (2018) Cell 175, 1731-1743) was measured on the NK cells from PBMCs cocultured with K562 target cells (chronic myelogenous leukemia cell line, ATCC #CCL-243) with anti-CD112R or isotype control antibodies.

[0139] Briefly, frozen PBMCs isolated from the buffy coats of healthy donors were thawed, washed, resuspended in DMEM+10% FBS+1% Penicillin-Streptomycyin (D10) and plated into 96 well flat bottom plates at a concentration of 5×10⁵ cells per well and rested for 4 hours at 37° C. prior to adding target cells and antibodies. Next, in a first experiment (FIG. 7A) antibodies were diluted in D10 and added to each well at starting concentration of 10 μg/mL, with 10-fold serial dilutions. In the next experiment (FIGS. 8C-8D) a single concentration (1 μg/mL) of anti-CD112R or IgG1 isotype control antibody was added to each well. For both experiments, each condition was run in duplicate. K562 cells were then harvested, washed and resuspended in D10 and added to each well at a concentration of 5×10⁴ cells per well. The final volume for each well was 200 μl. The plates were then incubated for 16 hours at 37° C. After 16 hours, cells were then transferred to V bottom plates and washed twice in PBS+2% FBS. Cells were stained with Anti-CD3 FITC (Biolegend, #300306), Anti-NKp46 BV421 (Biolegend #331914) and anti-CD137 APC (Biolegend, #309810) in PBS+2% FBS for 30 minutes at 4° C. Cells were subsequently washed twice and resuspended in PBS+2% FBS. Data was acquired using a LSRFortessa X-20 (BD Biosciences) flow cytometer and analyzed with FlowJo software (Tree Star). NK cell activation was defined as the frequency of CD137+ cells within the CD3-NKp46+ lymphocyte gate.

[0140] Results from two individual donors from two independent experiments are presented in FIG. 7A-7B.

[0141] FIG. 8 demonstrates increased activation of intra-tumoral NK cells 72 hours post-single dose of anti-CD112R and anti-TIGIT combination therapy vis-à-vis isotype control. Activation was assessed as fraction of granzyme B+ (FIG. 8A) and interferon-γ+ (FIG. 8B)

[0142] FIG. 9 reveals stronger tumor growth inhibition in mice treated with an anti-CD112R antibody with enhanced Fc effector function (mouse IgG2a, Clone 46) compared to the same antibody engineered with low Fc-effector function (mouse IgG1, Clone 46.mG1). Graph is a summary of 3 experiments, N=44-45 per group. Statistical analysis was performed by Mann-Whitney test on day 24 time-point.

[0143] FIG. 10 shows a subset of mice rejected CT26 tumors after treatment with anti-CD112R.mG2a and exhibited no palpable tumors beyond day 50 of inoculation. These mice rapidly rejected of CT26 tumors upon re-challenge indicating that treatment with an enhanced Fc effector function CD112R antibody in tumor bearing mice lead to the development of immunological memory and protective immunity in a subset of mice.

### Example 2

[0144] In a series of follow-up experiments, NK cell activation subsequent to co-culture with multiple permutations of anti-CD112R antibodies and anti-CD112R Fabs in PBMCs from additional donors was evaluated. The results demonstrate that enhanced clone 35 mediated NK cell activation requires both high Fc effector function and CD16 engagement in in vitro assays (FIGS. 11A-C).

[0145] FIG. 11A shows that clone 35 mediated NK cell activation is partially abrogated in the absence of an Fc backbone (antibody Fab). PBMCs from five donors were cocultured with K562 target cells with either full length clone 35, clone 35 Fab, full length isotype control or isotype control Fab for 24 hours. NK cell activation was assessed by upregulation of 4-1BB (CD137) expression by flow cytometry. Statistical analysis was performed by paired t test analysis.

[0146] FIG. 11B shows that clone 35 mediated NK cell activation is partially abrogated in absence of a glycosylated Fc backbone. Glycosylation of the Fc backbone at residue 297 significantly enhances the ability of IgG1 antibodies to bind to Fc receptors. The engineered mutation of the asparagine residue at position 297 to an alanine (N297A) prevents glycosylation of this residue and thus greatly diminishes the capacity of the antibody Fc backbone to engage Fc receptors (Wang et al, Protein Cell 2018). In this experiment PBMCs from five donors were cocultured with K562 target cells, clone 35, non-glycosylated clone 35 (Clone 35-N297A), effector function low clone 35 (hIgG4, Clone 35.4) or hIgG1 isotype control antibody for 24 hr. NK cell activation was assessed by upregulation of 4-1BB (CD137) expression by flow cytometry. Statistical analysis was performed by paired t test analysis.

[0147] FIG. 11C shows that clone 35 mediated NK cell activation is partially abrogated by CD16 blockade. PBMCs from five donors were cocultured with K562 target cells, clone 35 and Fab antibodies that block either CD16 (Ancell, Clone 3G8), CD32 (Ancell, Clone 7.3) or isotype control for 24 hr. NK cell activation was assessed by upregulation of 4-1BB (CD137) expression by flow cytometry. Statistical analysis was performed by paired t test analysis.

TABLE of
Sequences

| SEQ | Clone | | |
|---|---|---|---|
| ID NO | No | Description | Sequence |
| 1-200: | | | |
| Not used | | | |
| 201 | 44 | VH CDR1 | GTFDNYYIS |
| 202 | 44 | VH CDR2 | GIFPIFGTANYAQKFQG |
| 203 | 44 | VH CDR3 | AREVGHYSGSPYYMDV |
| 204 | 44 | VL CDR1 | RASQSINSWLA |
| 205 | 44 | VL CDR2 | DASSLES |
| 206 | 44 | VL CDR3 | QQVGPYLT |
| 207 | 44 | VH FR1 | QVQLVQSGAEVKKPGSSVKVSCKASG |
| 208 | 44 | VH FR2 | WVRQAPGQGLEWMG |
| 209 | 44 | VH FR3 | RVTITADESTSTAYMELSSLRSEDTAVYYC |
| 210 | 44 | VH FR4 | WGKGTTVTVSS |
| 211 | 44 | VH DNA | CAGGTGCAGCTGGTGCAGTCTGGGGCTGAGGTGAAGAAGCCTG |
| | | | GGTCCTCGGTGAAGGTCTCCTGCAAGGCTTCTGGAGGCACCTTC |
| | | | GACAACTATTACATCAGCTGGGTGCGACAGGCCCCTGGACAAGG |
| | | | GCTTGAGTGGATGGGAGGGATCTTCCCTATCTTCGGTACCGCAA |
| | | | ACTACGCACAGAAGTTCCAGGGCAGAGTCACGATTACCGCGGA |
| | | | CGAATCCACGAGCACAGCCTACATGGAGCTGAGCAGCCTGAGA |
| | | | TCTGAGGACACGGCGGTGTACTACTGCGCCAGAGAAGTCGGAC |
| | | | ACTACTCCGGCAGCCCATACTACATGGACGTATGGGGCAAGGGT |
| | | | ACAACTGTCACCGTCTCCTCA |
| 212 | 44 | VH Protein | QVQLVQSGAEVKKPGSSVKVSCKASGGTFDNYYISWVRQAPGQGL |
| | | | EWMGGIFPIFGTANYAQKFQGRVTITADESTSTAYMELSSLRSEDT |
| | | | AVYYCAREVGHYSGSPYYMDVWGKGTTVTVSS |
| 213 | 44 | VL FR1 | DIQMTQSPSTLSASVGDRVTITC |
| 214 | 44 | VL FR2 | WYQQKPGKAPKLLIS |
| 215 | 44 | VL FR3 | GVPSRFSGSGSGTEFTLTISSLQPDDFATYYC |
| 216 | 44 | VL FR4 | FGGGTKVEIK |
| 217 | 44 | VL DNA | GACATCCAGATGACCCAGTCTCCTTCCACCCTGTCTGCATCTGTA |
| | | | GGAGACAGAGTCACCATCACTTGCCGGGCCAGTCAGAGTATTAA |
| | | | TAGCTGGTTGGCCTGGTATCAGCAGAAACCAGGGAAAGCCCCTA |
| | | | AGCTCCTGATCTCCGATGCCTCCAGTTTGGAAAGTGGGGTCCCA |
| | | | TCAAGGTTCAGCGGCAGTGGATCTGGGACAGAATTCACTCTCAC |
| | | | CATCAGCAGCCTGCAGCCTGATGATTTTGCAACTTATTACTGCCA |
| | | | GCAGGTCGGCCCCTACCTCACTTTTGGCGGAGGGACCAAGGTTG |
| | | | AGATCAAA |
| 218 | 44 | VL Protein | DIQMTQSPSTLSASVGDRVTITCRASQSINSWLAWYQQKPGKAPKL |
| | | | LISDASSLESGVPSRFSGSGSGTEFTLTISSLQPDDFATYYCQQVGPY |
| | | | LTFGGGTKVEIK |
| 219-500: | | | |
| Not used | | | |
| 501 | 38 | VH CDR1 | FTFSGHLMS |
| 502 | 38 | VH CDR2 | AISGSAGETYYADSVKG |
| 503 | 38 | VH CDR3 | ARDAYYDDWSGWADWYFDL |
| 504 | 38 | VL CDR1 | RASQSVSRYLA |
| 505 | 38 | VL CDR2 | DASNRAT |
| 506 | 38 | VL CDR3 | QQVSLLPPT |
| 507 | 38 | VH FR1 | EVQLLESGGGLVQPGGSLRLSCAASG |
| 508 | 38 | VH FR2 | WVRQAPGKGLEWVS |
| 509 | 38 | VH FR3 | RFTISRDNSKNTLYLQMNSLRAEDTAVYYC |
| 510 | 38 | VH FR4 | WGRGTLVTVSS |
| 511 | 38 | VH DNA | GAGGTGCAGCTGTTGGAGTCTGGGGGAGGCTTGGTACAGCCTGG |
| | | | GGGGTCCCTGAGACTCTCCTGTGCAGCCTCTGGATTCACCTTTAG |
| | | | CGGACACCTAATGAGCTGGGTCCGCCAGGCTCCAGGGAAGGGG |
| | | | CTGGAGTGGGTCTCAGCTATTAGTGGATCCGCAGGTGAAACATA |
| | | | CTACGCAGACTCCGTGAAGGGCCGGTTCACCATCTCCAGAGACA |
| | | | ATTCCAAGAACACGCTGTATCTGCAAATGAACAGCCTGAGAGCC |
| | | | GAGGACACGGCGGTGTACTACTGCGCCAGAGATGCGTACTACG |
| | | | ACGACTGGAGCGGATGGGCCGATTGGTACTTCGATTTATGGGGG |
| | | | AGAGGTACCTTGGTCACCGTCTCCTCA |
| 512 | 38 | VH Protein | EVQLLESGGGLVQPGGSLRLSCAASGFTFSGHLMSWVRQAPGKGL |
| | | | EWVSAISGSAGETYYADSVKGRFTISRDNSKNTLYLQMNSLRAEDT |
| | | | AVYYCARDAYYDDWSGWADWYFDLWGRGTLVTVSS |
| 513 | 38 | VL FR1 | EIVLTQSPATLSLSPGERATLSC |
| 514 | 38 | VL FR2 | WYQQKPGQAPRLLIY |
| 515 | 38 | VL FR3 | GIPARFSGSGSGTDFTLTISSLEPEDFAVYYC |
| 516 | 38 | VL FR4 | FGGGTKVEIK |
| 517 | 38 | VL DNA | GAAATTGTGTTGACACAGTCTCCAGCCACCCTGTCTTTGTCTCCA |
| | | | GGGGAAAGAGCCACCCTCTCCTGCAGGGCCAGTCAGAGTGTTAG |
| | | | CAGGTACTTAGCCTGGTACCAACAGAAACCTGGCCAGGCTCCCA |
| | | | GGCTCCTCATCTATGATGCATCCAACAGGGCCACTGGCATCCCA |
| | | | GCCAGGTTCAGTGGCAGTGGGTCTGGGACAGACTTCACTCTCAC |
| | | | CATCAGCAGCCTAGAGCCTGAAGATTTTGCAGTTTATTACTGTC |
| | | | AGCAGGTCAGTCTCCTCCCTCCTACTTTTGGCGGAGGGACCAAG |
| | | | GTTGAGATCAAA |
| 518 | 38 | VL Protein | EIVLTQSPATLSLSPGERATLSCRASQSVSRYLAWYQQKPGQAPRLL |
| | | | IYDASNRATGIPARFSGSGSGTDFTLTISSLEPEDFAVYYCQQVSLLP |
| | | | PTFGGGTKVEIK |
| 519-700: | | | |
| Not used | | | |
| 701 | 35 | VH CDR1 | GTFSSAAIS |
| 702 | 35 | VH CDR2 | NIIPIVGIANYAQKFQG |
| 703 | 35 | VH CDR3 | ARDTGRGYTRHFWFDP |
| 704 | 35 | VL CDR1 | RASQSISSYLN |
| 705 | 35 | VL CDR2 | AASSLQS |
| 706 | 35 | VL CDR3 | QQSDILYT |
| 707 | 35 | VH FR1 | QVQLVQSGAEVKKPGSSVKVSCKASG |
| 708 | 35 | VH FR2 | WVRQAPGQGLEWMG |
| 709 | 35 | VH FR3 | RVTITADESTSTAYMELSSLRSEDTAVYYC |
| 710 | 35 | VH FR4 | WGQGTLVTVSS |
| 711 | 35 | VH DNA | CAGGTGCAGCTGGTGCAGTCTGGGGCTGAGGTGAAGAAGCCTG |
| | | | GGTCCTCGGTGAAGGTCTCCTGCAAGGCTTCTGGAGGCACCTTC |
| | | | AGCTCCGCCGCTATCAGCTGGGTGCGACAGGCCCCTGGACAAGG |
| | | | GCTTGAGTGGATGGGAAACATCATCCCTATCGTAGGTATAGCAA |
| | | | ACTACGCACAGAAGTTCCAGGGCAGAGTCACGATTACCGCGGA |
| | | | CGAATCCACGAGCACAGCCTACATGGAGCTGAGCAGCCTGAGA |
| | | | TCTGAGGACACGGCGGTGTACTACTGCGCCAGAGACACGGGAC |
| | | | GGGGATACACCAGACACTTCTGGTTTGACCCCTGGGGACAGGGT |
| | | | ACATTGGTCACCGTCTCCTCA |
| 712 | 35 | VH Protein | QVQLVQSGAEVKKPGSSVKVSCKASGGTFSSAAISWVRQAPGQGL |
| | | | EWMGNIIPIVGIANYAQKFQGRVTITADESTSTAYMELSSLRSEDTA |
| | | | VYYCARDTGRGYTRHFWFDPWGQGTLVTVSS |
| 713 | 35 | VL FR1 | DIQMTQSPSSLSASVGDRVTITC |
| 714 | 35 | VL FR2 | WYQQKPGKAPKLLIY |
| 715 | 35 | VL FR3 | GVPSRFSGSGSGTDFTLTISSLQPEDFATYYC |
| 716 | 35 | VL FR4 | FGGGTKVEIK |
| 717 | 35 | VL DNA | GACATCCAGATGACCCAGTCTCCATCCTCCCTGTCTGCATCTGTA |
| | | | GGAGACAGAGTCACCATCACTTGCCGGGCAAGTCAGAGCATTA |
| | | | GCAGCTATTTAAATTGGTATCAGCAGAAACCAGGGAAAGCCCCT |
| | | | AAGCTCCTGATCTATGCTGCATCCAGTTTGCAAAGTGGGGTCCC |
| | | | ATCAAGGTTCAGTGGCAGTGGATCTGGGACAGATTTCACTCTCA |
| | | | CCATCAGCAGTCTGCAACCTGAAGATTTTGCAACTTACTACTGTC |
| | | | AGCAAAGCGACATCCTCTACACTTTTGGCGGAGGGACCAAGGTT |
| | | | GAGATCAAA |
| 718 | 35 | VL Protein | DIQMTQSPSSLSASVGDRVTITCRASQSISSYLNWYQQKPGKAPKLL |
| | | | IYAASSLQSGVPSRFSGSGSGTDFTLTISSLQPEDFATYYCQQSDILY |
| | | | TFGGGTKVEIK |
| 719-90 | | | |
| not used | | | |
| 901 | 46 | VH CDR1 | FTFGDYAMS |
| 902 | 46 | VH CDR2 | FIGSKAYGGTTEYTASVKG |
| 903 | 46 | VH CDR3 | ARGPRRYTYGMDV |
| 904 | 46 | VL CDR1 | RASQSISSYLN |
| 905 | 46 | VL CDR2 | AASSLQS |
| 906 | 46 | VL CDR3 | QQSSTPLT |
| 907 | 46 | VH FR1 | EVQLVESGGGLVQPGRSLRLSCTASG |
| 908 | 46 | VH FR2 | WFRQAPGKGLEWVG |
| 909 | 46 | VH FR3 | RFTISRDGSKSIAYLQMNSLKTEDTAVYYC |
| 910 | 46 | VH FR4 | WGQGTTVTVSS |
| 911 | 46 | VH DNA | GAGGTGCAGCTGGTGGAGTCTGGGGGAGGCTTGGTACAGCCAG |
| | | | GGCGGTCCCTGAGACTCTCCTGTACAGCTTCTGGATTCACCTTTG |
| | | | GTGATTATGCTATGAGCTGGTTCCGCCAGGCTCCAGGGAAGGGG |
| | | | CTGGAGTGGGTAGGTTTCATTGGAAGCAAAGCTTATGGTGGGAC |
| | | | AACAGAATACACCGCGTCTGTGAAAGGCAGATTCACCATCTCAA |
| | | | GAGATGGTTCCAAAAGCATCGCCTATCTGCAAATGAACAGCCTG |
| | | | AAAACCGAGGACACGGCGGTGTACTACTGCGCCAGAGGACCAA |
| | | | GACGCTACACATACGGAATGGACGTATGGGGCCAGGGAACAAC |
| | | | TGTCACCGTCTCCTCA |
| 912 | 46 | VH Protein | EVQLVESGGGLVQPGRSLRLSCTASGFTFGDYAMSWFRQAPGKGL |
| | | | EWVGFIGSKAYGGTTEYTASVKGRFTISRDGSKSIAYLQMNSLKTE |
| | | | DTAVYYCARGPRRYTYGMDVWGQGTTVTVSS |
| 913 | 46 | VL FR1 | DIQMTQSPSSLSASVGDRVTITC |
| 914 | 46 | VL FR2 | WYQQKPGKAPKLLIY |
| 915 | 46 | VL FR3 | GVPSRFSGSGSGTDFTLTISSLQPEDFATYYC |
| 916 | 46 | VL FR4 | FGGGTKVEIK |
| 917 | 46 | VL DNA | GACATCCAGATGACCCAGTCTCCATCCTCCCTGTCTGCATCTGTA |
| | | | GGAGACAGAGTCACCATCACTTGCCGGGCAAGTCAGAGCATTA |
| | | | GCAGCTATTTAAATTGGTATCAGCAGAAACCAGGGAAAGCCCCT |
| | | | AAGCTCCTGATCTATGCTGCATCCAGTTTGCAAAGTGGGGTCCC |
| | | | ATCAAGGTTCAGTGGCAGTGGATCTGGGACAGATTTCACTCTCA |
| | | | CCATCAGCAGTCTGCAACCTGAAGATTTTGCAACTTACTACTGTC |
| | | | AGCAAAGCTCCACCCCCCTCACTTTTGGCGGAGGGACCAAGGTT |
| | | | GAGATCAAA |
| 918 | 46 | VL Protein | DIQMTQSPSSLSASVGDRVTITCRASQSISSYLNWYQQKPGKAPKLL |
| | | | IYAASSLQSGVPSRFSGSGSGTDFTLTISSLQPEDFATYYCQQSSTPL |
| | | | TFGGGTKVEIK |
| 919-39999 | | | |
| not used | | | |
| 40000 | | Human | ASTKGPSVFPLAPSSKSTSGGTAALGCLVKDYFPEPVTVSWNSGAL |
| | | IgG1 | TSGVHTFPAVLQSSGLYSLSSVVTVPSSSLGTQTYICNVNHKPSNTK |
| | | Constant | VDKKVEPKSCDKTHTCPPCPAPELLGGPSVFLFPPKPKDTLMISRTP |
| | | Region | EVTCVVVDVSHEDPEVKFNWYVDGVEVHNAKTKPREEQYNSTYR |
| | | | VVSVLTVLHQDWLNGKEYKCKVSNKALPAPIEKTISKAKGQPREP |
| | | | QVYTLPPSRDELTKNQVSLTCLVKGFYPSDIAVEWESNGQPENNYK |
| | | | TTPPVLDSDGSFFLYSKLTVDKSRWQQGNVFSCSVMHEALHNHYT |
| | | | QKSLSLSPGK |
| 40001 | | Human | ASTKGPSVFPLAPCSRSTSESTAALGCLVKDYFPEPVTVSWNSGALT |
| | | IgG4 | SGVHTFPAVLQSSGLYSLSSVVTVPSSSLGTKTYTCNVDHKPSNTK |
| | | Constant | VDKRVESKYGPPCPSCPAPEFLGGPSVFLFPPKPKDTLMISRTPEVTC |
| | | Region | VVVDVSQEDPEVQFNWYVDGVEVHNAKTKPREEQFNSTYRVVSV |
| | | (terminal K | LTVLHQDWLNGKEYKCKVSNKGLPSSIEKTISKAKGQPREPQVYTL |
| | | absent)* | PPSQEEMTKNQVSLTCLVKGFYPSDIAVEWESNGQPENNYKTTPPV |
| | | | LDSDGSFFLYSRLTVDKSRWQEGNVFSCSVMHEALHNHYTQKSLS |
| | | | LSLG- |
| | | | *The terminal K is cleaved during cell expression |
| | | | but is encoded for in the DNA sequence |
| 40002 | | Human | ASTKGPSVFPLAPCSRSTSESTAALGCLVKDYFPEPVTVSWNSGALT |
| | | IgG4 | SGVHTFPAVLQSSGLYSLSSVVTVPSSSLGTKTYTCNVDHKPSNTK |
| | | Constant | VDKRVESKYGPPCPPCPAPEFLGGPSVFLFPPKPKDTLMISRTPEVT |
| | | Region | CVVVDVSQEDPEVQFNWYVDGVEVHNAKTKPREEQFNSTYRVVS |
| | | (S228P; | VLTVLHQDWLNGKEYKCKVSNKGLPSSIEKTISKAKGQPREPQVYT |
| | | bolded) | LPPSQEEMTKNQVSLTCLVKGFYPSDIAVEWESNGQPENNYKTTPP |
| | | (terminal K | VLDSDGSFFLYSRLTVDKSRWQEGNVFSCSVMHEALHNHYTQKSL |
| | | absent)* | SLSLG- |
| | | | *The terminal K is cleaved during cell expression |
| | | | but is encoded for in the DNA sequence |
| 40003 | | Human | ASTKGPSVFPLAPCSRSTSESTAALGCLVKDYFPEPVTVSWNSGALT |
| | | IgG4 | SGVHTFPAVLQSSGLYSLSSVVTVPSSSLGTKTYTCNVDHKPSNTK |
| | | Constant | VDKRVESKYGPPCPPCPAPEFEGGPSVFLFPPKPKDTLMISRTPEVT |
| | | Region | CVVVDVSQEDPEVQFNWYVDGVEVHNAKTKPREEQFNSTYRVVS |
| | | (S228P) | VLTVLHQDWLNGKEYKCKVSNKGLPSSIEKTISKAKGQPREPQVYT |
| | | (L235E) | LPPSQEEMTKNQVSLTCLVKGFYPSDIAVEWESNGQPENNYKTTPP |
| | | (terminal K | VLDSDGSFFLYSRLTVDKSRWQEGNVFSCSVMHEALHNHYTQKSL |
| | | absent)* | SLSLG- |
| | | | *The terminal K is cleaved during cell expression |
| | | | but is encoded for in the DNA sequence |
| 40004 | 35 | Full length | CAAGTTCAGCTGGTGCAGAGCGGCGCTGAGGTGAAAAAGCCCG |
| | | clone 35 | GCAGCTCCGTGAAGGTGAGCTGCAAGGCCTCCGGCGGAACCTTC |
| | | heavy chain | TCCTCCGCTGCCATCTCTTGGGTGAGGCAAGCTCCCGGTCAAGG |
| | | DNA no | TTTAGAGTGGATGGGCAACATCATCCCCATCGTGGGCATCGCCA |
| | | leader | ACTACGCCCAGAAGTTCCAAGGTCGTGTGACCATCACCGCCGAC |
| | | | GAGTCCACCTCCACCGCCTACATGGAGCTGTCCTCTTTAAGGTCC |
| | | | GAGGACACCGCCGTGTACTACTGCGCTCGTGACACTGGTCGTGG |
| | | | ATACACTCGTCACTTCTGGTTCGACCCTTGGGGCCAAGGTACAC |
| | | | TGGTGACCGTGAGCTCCGCTAGCACCAAGGGCCCATCGGTCTTC |
| | | | CCCCTGGCACCCTCCTCCAAGAGCACCTCTGGGGGCACAGCGGC |
| | | | CCTGGGCTGCCTGGTCAAGGACTACTTCCCCGAACCGGTGACGG |
| | | | TGTCGTGGAACTCAGGCGCCCTGACCAGCGGCGTGCACACCTTC |
| | | | CCGGCCGTCCTACAGTCCTCAGGACTCTACTCCCTCAGCAGCGT |
| | | | GGTGACCGTGCCCTCCAGCAGCTTGGGCACCCAGACCTACATCT |
| | | | GCAACGTGAATCACAAGCCCAGCAACACCAAGGTGGACAAGAA |
| | | | GGTTGAGCCCAAATCTTGTGACAAAACTCACACATGCCCACCGT |
| | | | GCCCAGCACCTGAACTCCTGGGGGGACCGTCAGTCTTCCTCTTC |
| | | | CCCCCAAAACCCAAGGACACCCTCATGATCTCCCGGACCCCTGA |
| | | | GGTCACATGCGTGGTGGTGGACGTGAGCCACGAAGACCCTGAG |
| | | | GTCAAGTTCAACTGGTACGTGGACGGCGTGGAGGTGCATAATGC |
| | | | CAAGACAAAGCCGCGGGAGGAGCAGTACAACAGCACGTACCGT |
| | | | GTGGTCAGCGTCCTCACCGTCCTGCACCAGGACTGGCTGAATGG |
| | | | CAAGGAGTACAAGTGCAAGGTCTCCAACAAAGCCCTCCCAGCCC |
| | | | CCATCGAGAAAACCATCTCCAAAGCCAAAGGGCAGCCCCGAGA |
| | | | ACCACAGGTGTACACCCTGCCCCCATCCCGGGACGAGCTGACCA |
| | | | AGAACCAGGTCAGCCTGACCTGCCTGGTCAAAGGCTTCTATCCC |
| | | | AGCGACATCGCCGTGGAGTGGGAGAGCAATGGGCAGCCGGAGA |
| | | | ACAACTACAAGACCACGCCTCCCGTGCTGGACTCCGACGGCTCC |
| | | | TTCTTCCTCTACAGCAAGCTCACCGTGGACAAGAGCAGGTGGCA |
| | | | GCAGGGGAACGTCTTCTCATGCTCCGTGATGCATGAGGCTCTGC |
| | | | ACAACCACTACACGCAGAAGAGCCTCTCCCTGTCTCCGGGTAAA |
| | | | TGA |
| 40005 | 35 | Full length | GACATCCAGATGACCCAGTCCCCTTCCTCTTTATCCGCTTCCGTC |
| | | clone 35 | GGAGATCGTGTGACCATCACTTGTCGGGCCTCCCAGTCCATCAG |
| | | light chain | CTCCTATTTAAACTGGTACCAGCAGAAGCCCGGCAAGGCCCCCA |
| | | DNA no | AGCTGCTGATCTACGCCGCTTCTTCTTTACAGTCCGGCGTGCCTT |
| | | leader | CTCGTTTTTCTGGCTCCGGCTCTGGCACCGATTTCACTTTAACCA |
| | | | TCTCCTCCTTACAGCCCGAGGACTTCGCCACCTACTACTGCCAGC |
| | | | AGTCCGACATCCTGTACACCTTCGGCGGAGGCACCAAGGTGGAG |
| | | | ATCAAGCGTACGGTGGCTGCACCATCTGTCTTCATCTTCCCGCCA |
| | | | TCTGATGAGCAGTTGAAATCTGGAACTGCCTCTGTTGTGTGCCTG |
| | | | CTGAATAACTTCTATCCCAGAGAGGCCAAAGTACAGTGGAAGGT |
| | | | GGATAACGCCCTCCAATCGGGTAACTCCCAGGAGAGTGTCACAG |
| | | | AGCAGGACAGCAAGGACAGCACCTACAGCCTCAGCAGCACCCT |
| | | | GACGCTGAGCAAAGCAGACTACGAGAAACACAAAGTCTACGCC |
| | | | TGCGAAGTCACCCATCAGGGCCTGAGCTCGCCCGTCACAAAGAG |
| | | | CTTCAACAGGGGAGAGTGTTGA |
| 40006 | 35.4 | Full length | CAAGTTCAGCTGGTGCAGAGCGGCGCTGAGGTGAAAAAGCCCG |
| | | clone 35.4 | GCAGCTCCGTGAAGGTGAGCTGCAAGGCCTCCGGCGGAACCTTC |
| | | heavy chain | TCCTCCGCTGCCATCTCTTGGGTGAGGCAAGCTCCCGGTCAAGG |
| | | DNA no | TTTAGAGTGGATGGGCAACATCATCCCCATCGTGGGCATCGCCA |
| | | leader | ACTACGCCCAGAAGTTCCAAGGTCGTGTGACCATCACCGCCGAC |
| | | | GAGTCCACCTCCACCGCCTACATGGAGCTGTCCTCTTTAAGGTCC |
| | | | GAGGACACCGCCGTGTACTACTGCGCTCGTGACACTGGTCGTGG |
| | | | ATACACTCGTCACTTCTGGTTCGACCCTTGGGGCCAAGGTACAC |
| | | | TGGTGACCGTGAGCTCCGCTAGCACCAAGGGCCCATCCGTCTTC |
| | | | CCCCTGGCGCCCTGCTCCAGGAGCACCTCCGAGAGCACAGCCGC |
| | | | CCTGGGCTGCCTGGTCAAGGACTACTTCCCCGAACCGGTGACGG |
| | | | TGTCGTGGAACTCAGGCGCCCTGACCAGCGGCGTGCACACCTTC |
| | | | CCGGCTGTCCTACAGTCCTCAGGACTCTACTCCCTCAGCAGCGT |
| | | | GGTGACCGTGCCCTCCAGCAGCTTGGGCACGAAGACCTACACCT |
| | | | GCAACGTAGATCACAAGCCCAGCAACACCAAGGTGGACAAGAG |
| | | | AGTTGAGTCCAAATATGGTCCCCCATGCCCACCATGCCCAGCAC |
| | | | CTGAGTTCCTGGGGGGACCATCAGTCTTCCTGTTCCCCCCAAAA |
| | | | CCCAAGGACACTCTCATGATCTCCCGGACCCCTGAGGTCACGTG |
| | | | CGTGGTGGTGGACGTGAGCCAGGAAGACCCCGAGGTCCAGTTC |
| | | | AACTGGTACGTGGATGGCGTGGAGGTGCATAATGCCAAGACAA |
| | | | AGCCGCGGGAGGAGCAGTTCAACAGCACGTACCGTGTGGTCAG |
| | | | CGTCCTCACCGTCCTGCACCAGGACTGGCTGAACGGCAAGGAGT |
| | | | ACAAGTGCAAGGTCTCCAACAAAGGCCTCCCGTCCTCCATCGAG |
| | | | AAAACCATCTCCAAAGCCAAAGGGCAGCCCCGAGAGCCACAGG |
| | | | TGTACACCCTGCCCCCATCCCAGGAGGAGATGACCAAGAACCAG |
| | | | GTCAGCCTGACCTGCCTGGTCAAAGGCTTCTACCCCAGCGACAT |
| | | | CGCCGTGGAGTGGGAGAGCAATGGGCAGCCGGAGAACAACTAC |
| | | | AAGACCACGCCTCCCGTGCTGGACTCCGACGGCTCCTTCTTCCTC |
| | | | TACAGCAGGCTAACCGTGGACAAGAGCAGGTGGCAGGAGGGGA |
| | | | ATGTCTTCTCATGCTCCGTGATGCATGAGGCTCTGCACAACCACT |
| | | | ACACACAGAAGAGCCTCTCCCTGTCTCTGGGTAAATGA |
| 40007 | 35.4 | Full length | GACATCCAGATGACCCAGTCCCCTTCCTCTTTATCCGCTTCCGTC |
| | | clone 35.4 | GGAGATCGTGTGACCATCACTTGTCGGGCCTCCCAGTCCATCAG |
| | | light chain | CTCCTATTTAAACTGGTACCAGCAGAAGCCCGGCAAGGCCCCCA |
| | | DNA no | AGCTGCTGATCTACGCCGCTTCTTCTTTACAGTCCGGCGTGCCTT |
| | | leader | CTCGTTTTTCTGGCTCCGGCTCTGGCACCGATTTCACTTTAACCA |
| | | | TCTCCTCCTTACAGCCCGAGGACTTCGCCACCTACTACTGCCAGC |
| | | | AGTCCGACATCCTGTACACCTTCGGCGGAGGCACCAAGGTGGAG |
| | | | ATCAAGCGTACGGTGGCTGCACCATCTGTCTTCATCTTCCCGCCA |
| | | | TCTGATGAGCAGTTGAAATCTGGAACTGCCTCTGTTGTGTGCCTG |
| | | | CTGAATAACTTCTATCCCAGAGAGGCCAAAGTACAGTGGAAGGT |
| | | | GGATAACGCCCTCCAATCGGGTAACTCCCAGGAGAGTGTCACAG |
| | | | AGCAGGACAGCAAGGACAGCACCTACAGCCTCAGCAGCACCCT |
| | | | GACGCTGAGCAAAGCAGACTACGAGAAACACAAAGTCTACGCC |
| | | | TGCGAAGTCACCCATCAGGGCCTGAGCTCGCCCGTCACAAAGAG |
| | | | CTTCAACAGGGGAGAGTGTTGA |

The application's sequence listing, which the Patent Office published only in electronic form, follows.

SEQUENCE LISTING (40007 sequences)

SEQ ID NO: 1-200 - skipped (200 entries)

SEQ ID NO: 201 - protein, 9 aa, Artificial Sequence
  Synthetic: 44, VH CDR1
GTFDNYYIS

SEQ ID NO: 202 - protein, 17 aa, Artificial Sequence
  Synthetic: 44, VH CDR2
GIFPIFGTANYAQKFQG

SEQ ID NO: 203 - protein, 16 aa, Artificial Sequence
  Synthetic: 44, VH CDR3
AREVGHYSGSPYYMDV

SEQ ID NO: 204 - protein, 11 aa, Artificial Sequence
  Synthetic: 44, VL CDR1
RASQSINSWLA

SEQ ID NO: 205 - protein, 7 aa, Artificial Sequence
  Synthetic: 44, VL CDR2
DASSLES

SEQ ID NO: 206 - protein, 8 aa, Artificial Sequence
  Synthetic: 44, VL CDR3
QQVGPYLT

SEQ ID NO: 207 - protein, 26 aa, Artificial Sequence
  Synthetic: 44, VH FR1
QVQLVQSGAEVKKPGSSVKVSCKASG

SEQ ID NO: 208 - protein, 14 aa, Artificial Sequence
  Synthetic: 44, VH FR2
WVRQAPGQGLEWMG

SEQ ID NO: 209 - protein, 30 aa, Artificial Sequence
  Synthetic: 44, VH FR3
RVTITADESTSTAYMELSSLRSEDTAVYYC

SEQ ID NO: 210 - protein, 11 aa, Artificial Sequence
  Synthetic: 44, VH FR4
WGKGTTVTVSS

SEQ ID NO: 211 - DNA, 369 bp, Artificial Sequence
  Synthetic: 44, VH DNA
caggtgcagctggtgcagtctggggctgaggtgaagaagcctgggtcctcggtgaaggtctcctgcaaggcttctggaggcaccttcgacaactattacatcagctgggtgcgacaggcccctggacaagggcttgagtggatgggagggatcttccctatcttcggtaccgcaaactacgcacagaagttccagggcagagtcacgattaccgcggacgaatccacgagcacagcctacatggagctgagcagcctgagatctgaggacacggcggtgtactactgcgccagagaagtcggacactactccggcagcccatactacatggacgtatggggcaagggtacaactgtcaccgtctcctca

SEQ ID NO: 212 - protein, 123 aa, Artificial Sequence
  Synthetic: 44, VH Protein
QVQLVQSGAEVKKPGSSVKVSCKASGGTFDNYYISWVRQAPGQGLEWMGGIFPIFGTANYAQKFQGRVTITADESTSTAYMELSSLRSEDTAVYYCAREVGHYSGSPYYMDVWGKGTTVTVSS

SEQ ID NO: 213 - protein, 23 aa, Artificial Sequence
  Synthetic: 44, VL FR1
DIQMTQSPSTLSASVGDRVTITC

SEQ ID NO: 214 - protein, 15 aa, Artificial Sequence
  Synthetic: 44, VL FR2
WYQQKPGKAPKLLIS

SEQ ID NO: 215 - protein, 32 aa, Artificial Sequence
  Synthetic: 44, VL FR3
GVPSRFSGSGSGTEFTLTISSLQPDDFATYYC

SEQ ID NO: 216 - protein, 10 aa, Artificial Sequence
  Synthetic: 44, VL FR4
FGGGTKVEIK

SEQ ID NO: 217 - DNA, 318 bp, Artificial Sequence
  Synthetic: 44, VL DNA
gacatccagatgacccagtctccttccaccctgtctgcatctgtaggagacagagtcaccatcacttgccgggccagtcagagtattaatagctggttggcctggtatcagcagaaaccagggaaagcccctaagctcctgatctccgatgcctccagtttggaaagtggggtcccatcaaggttcagcggcagtggatctgggacagaattcactctcaccatcagcagcctgcagcctgatgattttgcaacttattactgccagcaggtcggcccctacctcacttttggcggagggaccaaggttgagatcaaa

SEQ ID NO: 218 - protein, 106 aa, Artificial Sequence
  Synthetic: 44, VL Protein
DIQMTQSPSTLSASVGDRVTITCRASQSINSWLAWYQQKPGKAPKLLISDASSLESGVPSRFSGSGSGTEFTLTISSLQPDDFATYYCQQVGPYLTFGGGTKVEIK

SEQ ID NO: 219-500 - skipped (282 entries)

SEQ ID NO: 501 - protein, 9 aa, Artificial Sequence
  Synthetic: 38, VH CDR1
FTFSGHLMS

SEQ ID NO: 502 - protein, 17 aa, Artificial Sequence
  Synthetic: 38, VH CDR2
AISGSAGETYYADSVKG

SEQ ID NO: 503 - protein, 19 aa, Artificial Sequence
  Synthetic: 38, VH CDR3
ARDAYYDDWSGWADWYFDL

SEQ ID NO: 504 - protein, 11 aa, Artificial Sequence
  Synthetic: 38, VL CDR1
RASQSVSRYLA

SEQ ID NO: 505 - protein, 7 aa, Artificial Sequence
  Synthetic: 38, VL CDR2
DASNRAT

SEQ ID NO: 506 - protein, 9 aa, Artificial Sequence
  Synthetic: 38, VL CDR3
QQVSLLPPT

SEQ ID NO: 507 - protein, 26 aa, Artificial Sequence
  Synthetic: 38, VH FR1
EVQLLESGGGLVQPGGSLRLSCAASG

SEQ ID NO: 508 - protein, 14 aa, Artificial Sequence
  Synthetic: 38, VH FR2
WVRQAPGKGLEWVS

SEQ ID NO: 509 - protein, 30 aa, Artificial Sequence
  Synthetic: 38, VH FR3
RFTISRDNSKNTLYLQMNSLRAEDTAVYYC

SEQ ID NO: 510 - protein, 11 aa, Artificial Sequence
  Synthetic: 38, VH FR4
WGRGTLVTVSS

SEQ ID NO: 511 - DNA, 378 bp, Artificial Sequence
  Synthetic: 38, VH DNA
gaggtgcagctgttggagtctgggggaggcttggtacagcctggggggtccctgagactctcctgtgcagcctctggattcacctttagcggacacctaatgagctgggtccgccaggctccagggaaggggctggagtgggtctcagctattagtggatccgcaggtgaaacatactacgcagactccgtgaagggccggttcaccatctccagagacaattccaagaacacgctgtatctgcaaatgaacagcctgagagccgaggacacggcggtgtactactgcgccagagatgcgtactacgacgactggagcggatgggccgattggtacttcgatttatgggggagaggtaccttggtcaccgtctcctca

SEQ ID NO: 512 - protein, 126 aa, Artificial Sequence
  Synthetic: 38, VH Protein
EVQLLESGGGLVQPGGSLRLSCAASGFTFSGHLMSWVRQAPGKGLEWVSAISGSAGETYYADSVKGRFTISRDNSKNTLYLQMNSLRAEDTAVYYCARDAYYDDWSGWADWYFDLWGRGTLVTVSS

SEQ ID NO: 513 - protein, 23 aa, Artificial Sequence
  Synthetic: 38, VL FR1
EIVLTQSPATLSLSPGERATLSC

SEQ ID NO: 514 - protein, 15 aa, Artificial Sequence
  Synthetic: 38, VL FR2
WYQQKPGQAPRLLIY

SEQ ID NO: 515 - protein, 32 aa, Artificial Sequence
  Synthetic: 38, VL FR3
GIPARFSGSGSGTDFTLTISSLEPEDFAVYYC

SEQ ID NO: 516 - protein, 10 aa, Artificial Sequence
  Synthetic: 38, VL FR4
FGGGTKVEIK

SEQ ID NO: 517 - DNA, 321 bp, Artificial Sequence
  Synthetic: 38, VL DNA
gaaattgtgttgacacagtctccagccaccctgtctttgtctccaggggaaagagccaccctctcctgcagggccagtcagagtgttagcaggtacttagcctggtaccaacagaaacctggccaggctcccaggctcctcatctatgatgcatccaacagggccactggcatcccagccaggttcagtggcagtgggtctgggacagacttcactctcaccatcagcagcctagagcctgaagattttgcagtttattactgtcagcaggtcagtctcctccctcctacttttggcggagggaccaaggttgagatcaaa

SEQ ID NO: 518 - protein, 107 aa, Artificial Sequence
  Synthetic: 38, VL Protein
EIVLTQSPATLSLSPGERATLSCRASQSVSRYLAWYQQKPGQAPRLLIYDASNRATGIPARFSGSGSGTDFTLTISSLEPEDFAVYYCQQVSLLPPTFGGGTKVEIK

SEQ ID NO: 519-700 - skipped (182 entries)

SEQ ID NO: 701 - protein, 9 aa, Artificial Sequence
  Synthetic: 35, VH CDR1
GTFSSAAIS

SEQ ID NO: 702 - protein, 17 aa, Artificial Sequence
  Synthetic: 35, VH CDR2
NIIPIVGIANYAQKFQG

SEQ ID NO: 703 - protein, 16 aa, Artificial Sequence
  Synthetic: 35, VH CDR3
ARDTGRGYTRHFWFDP

SEQ ID NO: 704 - protein, 11 aa, Artificial Sequence
  Synthetic: 35, VL CDR1
RASQSISSYLN

SEQ ID NO: 705 - protein, 7 aa, Artificial Sequence
  Synthetic: 35, VL CDR2
AASSLQS

SEQ ID NO: 706 - protein, 8 aa, Artificial Sequence
  Synthetic: 35, VL CDR3
QQSDILYT

SEQ ID NO: 707 - protein, 26 aa, Artificial Sequence
  Synthetic: 35, VH FR1
QVQLVQSGAEVKKPGSSVKVSCKASG

SEQ ID NO: 708 - protein, 14 aa, Artificial Sequence
  Synthetic: 35, VH FR2
WVRQAPGQGLEWMG

SEQ ID NO: 709 - protein, 30 aa, Artificial Sequence; identical to SEQ ID NO: 209
  Synthetic: 35, VH FR3

SEQ ID NO: 710 - protein, 11 aa, Artificial Sequence
  Synthetic: 35, VH FR4
WGQGTLVTVSS

SEQ ID NO: 711 - DNA, 369 bp, Artificial Sequence
  Synthetic: 35, VH DNA
caggtgcagctggtgcagtctggggctgaggtgaagaagcctgggtcctcggtgaaggtctcctgcaaggcttctggaggcaccttcagctccgccgctatcagctgggtgcgacaggcccctggacaagggcttgagtggatgggaaacatcatccctatcgtaggtatagcaaactacgcacagaagttccagggcagagtcacgattaccgcggacgaatccacgagcacagcctacatggagctgagcagcctgagatctgaggacacggcggtgtactactgcgccagagacacgggacggggatacaccagacacttctggtttgacccctggggacagggtacattggtcaccgtctcctca

SEQ ID NO: 712 - protein, 123 aa, Artificial Sequence
  Synthetic: 35, VH Protein
QVQLVQSGAEVKKPGSSVKVSCKASGGTFSSAAISWVRQAPGQGLEWMGNIIPIVGIANYAQKFQGRVTITADESTSTAYMELSSLRSEDTAVYYCARDTGRGYTRHFWFDPWGQGTLVTVSS

SEQ ID NO: 713 - protein, 23 aa, Artificial Sequence
  Synthetic: 35, VL FR1
DIQMTQSPSSLSASVGDRVTITC

SEQ ID NO: 714 - protein, 15 aa, Artificial Sequence
  Synthetic: 35, VL FR2
WYQQKPGKAPKLLIY

SEQ ID NO: 715 - protein, 32 aa, Artificial Sequence
  Synthetic: 35, VL FR3
GVPSRFSGSGSGTDFTLTISSLQPEDFATYYC

SEQ ID NO: 716 - protein, 10 aa, Artificial Sequence
  Synthetic: 35, VL FR4
FGGGTKVEIK

SEQ ID NO: 717 - DNA, 318 bp, Artificial Sequence
  Synthetic: 35, VL DNA
gacatccagatgacccagtctccatcctccctgtctgcatctgtaggagacagagtcaccatcacttgccgggcaagtcagagcattagcagctatttaaattggtatcagcagaaaccagggaaagcccctaagctcctgatctatgctgcatccagtttgcaaagtggggtcccatcaaggttcagtggcagtggatctgggacagatttcactctcaccatcagcagtctgcaacctgaagattttgcaacttactactgtcagcaaagcgacatcctctacacttttggcggagggaccaaggttgagatcaaa

SEQ ID NO: 718 - protein, 106 aa, Artificial Sequence
  Synthetic: 35, VL Protein
DIQMTQSPSSLSASVGDRVTITCRASQSISSYLNWYQQKPGKAPKLLIYAASSLQSGVPSRFSGSGSGTDFTLTISSLQPEDFATYYCQQSDILYTFGGGTKVEIK

SEQ ID NO: 719-900 - skipped (182 entries)

SEQ ID NO: 901 - protein, 9 aa, Artificial Sequence
  Synthetic: 46, VH CDR1
FTFGDYAMS

SEQ ID NO: 902 - protein, 19 aa, Artificial Sequence
  Synthetic: 46, VH CDR2
FIGSKAYGGTTEYTASVKG

SEQ ID NO: 903 - protein, 13 aa, Artificial Sequence
  Synthetic: 46, VH CDR3
ARGPRRYTYGMDV

SEQ ID NO: 904 - protein, 11 aa, Artificial Sequence
  Synthetic: 46, VL CDR1
RASQSISSYLN

SEQ ID NO: 905 - protein, 7 aa, Artificial Sequence
  Synthetic: 46, VL CDR2
AASSLQS

SEQ ID NO: 906 - protein, 8 aa, Artificial Sequence
  Synthetic: 46, VL CDR3
QQSSTPLT

SEQ ID NO: 907 - protein, 26 aa, Artificial Sequence
  Synthetic: 46, VH FR1
EVQLVESGGGLVQPGRSLRLSCTASG

SEQ ID NO: 908 - protein, 14 aa, Artificial Sequence
  Synthetic: 46, VH FR2
WFRQAPGKGLEWVG

SEQ ID NO: 909 - protein, 30 aa, Artificial Sequence
  Synthetic: 46, VH FR3
RFTISRDGSKSIAYLQMNSLKTEDTAVYYC

SEQ ID NO: 910 - protein, 11 aa, Artificial Sequence
  Synthetic: 46, VH FR4
WGQGTTVTVSS

SEQ ID NO: 911 - DNA, 366 bp, Artificial Sequence
  Synthetic: 46, VH DNA
gaggtgcagctggtggagtctgggggaggcttggtacagccagggcggtccctgagactctcctgtacagcttctggattcacctttggtgattatgctatgagctggttccgccaggctccagggaaggggctggagtgggtaggtttcattggaagcaaagcttatggtgggacaacagaatacaccgcgtctgtgaaaggcagattcaccatctcaagagatggttccaaaagcatcgcctatctgcaaatgaacagcctgaaaaccgaggacacggcggtgtactactgcgccagaggaccaagacgctacacatacggaatggacgtatggggccagggaacaactgtcaccgtctcctca

SEQ ID NO: 912 - protein, 122 aa, Artificial Sequence
  Synthetic: 46, VH Protein
EVQLVESGGGLVQPGRSLRLSCTASGFTFGDYAMSWFRQAPGKGLEWVGFIGSKAYGGTTEYTASVKGRFTISRDGSKSIAYLQMNSLKTEDTAVYYCARGPRRYTYGMDVWGQGTTVTVSS

SEQ ID NO: 913 - protein, 23 aa, Artificial Sequence
  Synthetic: 46, VL FR1
DIQMTQSPSSLSASVGDRVTITC

SEQ ID NO: 914 - protein, 15 aa, Artificial Sequence
  Synthetic: 46, VL FR2
WYQQKPGKAPKLLIY

SEQ ID NO: 915 - protein, 32 aa, Artificial Sequence; identical to SEQ ID NO: 715
  Synthetic: 46, VL FR3

SEQ ID NO: 916 - protein, 10 aa, Artificial Sequence
  Synthetic: 46, VL FR4
FGGGTKVEIK

SEQ ID NO: 917 - DNA, 318 bp, Artificial Sequence
  Synthetic: 46, VL DNA
gacatccagatgacccagtctccatcctccctgtctgcatctgtaggagacagagtcaccatcacttgccgggcaagtcagagcattagcagctatttaaattggtatcagcagaaaccagggaaagcccctaagctcctgatctatgctgcatccagtttgcaaagtggggtcccatcaaggttcagtggcagtggatctgggacagatttcactctcaccatcagcagtctgcaacctgaagattttgcaacttactactgtcagcaaagctccacccccctcacttttggcggagggaccaaggttgagatcaaa

SEQ ID NO: 918 - protein, 106 aa, Artificial Sequence
  Synthetic: 46, VL Protein
DIQMTQSPSSLSASVGDRVTITCRASQSISSYLNWYQQKPGKAPKLLIYAASSLQSGVPSRFSGSGSGTDFTLTISSLQPEDFATYYCQQSSTPLTFGGGTKVEIK

SEQ ID NO: 919-39999 - skipped (39081 entries)

SEQ ID NO: 40000 - protein, 330 aa, Homo sapiens [sequence omitted]

SEQ ID NO: 40001 - protein, 326 aa, Homo sapiens
  misc_feature: Human IgG1 Constant Region (terminal K absent)
ASTKGPSVFPLAPCSRSTSESTAALGCLVKDYFPEPVTVSWNSGALTSGVHTFPAVLQSSGLYSLSSVVTVPSSSLGTKTYTCNVDHKPSNTKVDKRVESKYGPPCPSCPAPEFLGGPSVFLFPPKPKDTLMISRTPEVTCVVVDVSQEDPEVQFNWYVDGVEVHNAKTKPREEQFNSTYRVVSVLTVLHQDWLNGKEYKCKVSNKGLPSSIEKTISKAKGQPREPQVYTLPPSQEEMTKNQVSLTCLVKGFYPSDIAVEWESNGQPENNYKTTPPVLDSDGSFFLYSRLTVDKSRWQEGNVFSCSVMHEALHNHYTQKSLSLSLG

SEQ ID NO: 40002 - protein, 326 aa, Homo sapiens
  misc_feature: Human IgG1 Constant Region (S228P)(terminal K absent)
ASTKGPSVFPLAPCSRSTSESTAALGCLVKDYFPEPVTVSWNSGALTSGVHTFPAVLQSSGLYSLSSVVTVPSSSLGTKTYTCNVDHKPSNTKVDKRVESKYGPPCPPCPAPEFLGGPSVFLFPPKPKDTLMISRTPEVTCVVVDVSQEDPEVQFNWYVDGVEVHNAKTKPREEQFNSTYRVVSVLTVLHQDWLNGKEYKCKVSNKGLPSSIEKTISKAKGQPREPQVYTLPPSQEEMTKNQVSLTCLVKGFYPSDIAVEWESNGQPENNYKTTPPVLDSDGSFFLYSRLTVDKSRWQEGNVFSCSVMHEALHNHYTQKSLSLSLG

SEQ ID NO: 40003 - protein, 326 aa, Homo sapiens
  misc_feature: Human IgG1 Constant Region (S228P)(L235E)(terminal K absent)
ASTKGPSVFPLAPCSRSTSESTAALGCLVKDYFPEPVTVSWNSGALTSGVHTFPAVLQSSGLYSLSSVVTVPSSSLGTKTYTCNVDHKPSNTKVDKRVESKYGPPCPPCPAPEFEGGPSVFLFPPKPKDTLMISRTPEVTCVVVDVSQEDPEVQFNWYVDGVEVHNAKTKPREEQFNSTYRVVSVLTVLHQDWLNGKEYKCKVSNKGLPSSIEKTISKAKGQPREPQVYTLPPSQEEMTKNQVSLTCLVKGFYPSDIAVEWESNGQPENNYKTTPPVLDSDGSFFLYSRLTVDKSRWQEGNVFSCSVMHEALHNHYTQKSLSLSLG

SEQ ID NO: 40004 - DNA, 1362 bp, Artificial Sequence
  Synthetic: Full length clone 35  heavy chain DNA no leader
caagttcagctggtgcagagcggcgctgaggtgaaaaagcccggcagctccgtgaaggtgagctgcaaggcctccggcggaaccttctcctccgctgccatctcttgggtgaggcaagctcccggtcaaggtttagagtggatgggcaacatcatccccatcgtgggcatcgccaactacgcccagaagttccaaggtcgtgtgaccatcaccgccgacgagtccacctccaccgcctacatggagctgtcctctttaaggtccgaggacaccgccgtgtactactgcgctcgtgacactggtcgtggatacactcgtcacttctggttcgacccttggggccaaggtacactggtgaccgtgagctccgctagcaccaagggcccatcggtcttccccctggcaccctcctccaagagcacctctgggggcacagcggccctgggctgcctggtcaaggactacttccccgaaccggtgacggtgtcgtggaactcaggcgccctgaccagcggcgtgcacaccttcccggccgtcctacagtcctcaggactctactccctcagcagcgtggtgaccgtgccctccagcagcttgggcacccagacctacatctgcaacgtgaatcacaagcccagcaacaccaaggtggacaagaaggttgagcccaaatcttgtgacaaaactcacacatgcccaccgtgcccagcacctgaactcctggggggaccgtcagtcttcctcttccccccaaaacccaaggacaccctcatgatctcccggacccctgaggtcacatgcgtggtggtggacgtgagccacgaagaccctgaggtcaagttcaactggtacgtggacggcgtggaggtgcataatgccaagacaaagccgcgggaggagcagtacaacagcacgtaccgtgtggtcagcgtcctcaccgtcctgcaccaggactggctgaatggcaaggagtacaagtgcaaggtctccaacaaagccctcccagcccccatcgagaaaaccatctccaaagccaaagggcagccccgagaaccacaggtgtacaccctgcccccatcccgggacgagctgaccaagaaccaggtcagcctgacctgcctggtcaaaggcttctatcccagcgacatcgccgtggagtgggagagcaatgggcagccggagaacaactacaagaccacgcctcccgtgctggactccgacggctccttcttcctctacagcaagctcaccgtggacaagagcaggtggcagcaggggaacgtcttctcatgctccgtgatgcatgaggctctgcacaaccactacacgcagaagagcctctccctgtctccgggtaaatga

SEQ ID NO: 40005 - DNA, 642 bp, Artificial Sequence
  Synthetic: Full length clone 35 light chain DNA no leader
gacatccagatgacccagtccccttcctctttatccgcttccgtcggagatcgtgtgaccatcacttgtcgggcctcccagtccatcagctcctatttaaactggtaccagcagaagcccggcaaggcccccaagctgctgatctacgccgcttcttctttacagtccggcgtgccttctcgtttttctggctccggctctggcaccgatttcactttaaccatctcctccttacagcccgaggacttcgccacctactactgccagcagtccgacatcctgtacaccttcggcggaggcaccaaggtggagatcaagcgtacggtggctgcaccatctgtcttcatcttcccgccatctgatgagcagttgaaatctggaactgcctctgttgtgtgcctgctgaataacttctatcccagagaggccaaagtacagtggaaggtggataacgccctccaatcgggtaactcccaggagagtgtcacagagcaggacagcaaggacagcacctacagcctcagcagcaccctgacgctgagcaaagcagactacgagaaacacaaagtctacgcctgcgaagtcacccatcagggcctgagctcgcccgtcacaaagagcttcaacaggggagagtgttga

SEQ ID NO: 40006 - DNA, 1353 bp, Artificial Sequence
  Synthetic: Full length clone 35.4 heavy chain DNA no leader
caagttcagctggtgcagagcggcgctgaggtgaaaaagcccggcagctccgtgaaggtgagctgcaaggcctccggcggaaccttctcctccgctgccatctcttgggtgaggcaagctcccggtcaaggtttagagtggatgggcaacatcatccccatcgtgggcatcgccaactacgcccagaagttccaaggtcgtgtgaccatcaccgccgacgagtccacctccaccgcctacatggagctgtcctctttaaggtccgaggacaccgccgtgtactactgcgctcgtgacactggtcgtggatacactcgtcacttctggttcgacccttggggccaaggtacactggtgaccgtgagctccgctagcaccaagggcccatccgtcttccccctggcgccctgctccaggagcacctccgagagcacagccgccctgggctgcctggtcaaggactacttccccgaaccggtgacggtgtcgtggaactcaggcgccctgaccagcggcgtgcacaccttcccggctgtcctacagtcctcaggactctactccctcagcagcgtggtgaccgtgccctccagcagcttgggcacgaagacctacacctgcaacgtagatcacaagcccagcaacaccaaggtggacaagagagttgagtccaaatatggtcccccatgcccaccatgcccagcacctgagttcctggggggaccatcagtcttcctgttccccccaaaacccaaggacactctcatgatctcccggacccctgaggtcacgtgcgtggtggtggacgtgagccaggaagaccccgaggtccagttcaactggtacgtggatggcgtggaggtgcataatgccaagacaaagccgcgggaggagcagttcaacagcacgtaccgtgtggtcagcgtcctcaccgtcctgcaccaggactggctgaacggcaaggagtacaagtgcaaggtctccaacaaaggcctcccgtcctccatcgagaaaaccatctccaaagccaaagggcagccccgagagccacaggtgtacaccctgcccccatcccaggaggagatgaccaagaaccaggtcagcctgacctgcctggtcaaaggcttctaccccagcgacatcgccgtggagtgggagagcaatgggcagccggagaacaactacaagaccacgcctcccgtgctggactccgacggctccttcttcctctacagcaggctaaccgtggacaagagcaggtggcaggaggggaatgtcttctcatgctccgtgatgcatgaggctctgcacaaccactacacacagaagagcctctccctgtctctgggtaaatga

SEQ ID NO: 40007 - DNA, 642 bp, Artificial Sequence; identical to SEQ ID NO: 40005
  Synthetic: Full length clone 35.4 light chain DNA no leader

1. A method of
i) treating cancer by preferentially activating NK cells; and/or
ii) enhancing NK cell activation; and/or
iii) enhancing NK cell activation and not enhancing T cell activation, comprising administering to a human in need thereof a composition that engages, couples, or binds CD16 and CD112R.

2. The method of claim 1, wherein the composition is a multispecific antibody, wherein the antibody binds to, blocks, and/or activates CD16 and CD112R.

3. The method of claim 1, wherein the composition comprises a CD16 agonist and an agent that binds to and/or activates CD112R.

4. The method of claim 1, wherein the composition comprises an anti-CD16 antibody.

5. The method of claim 1, wherein the composition comprises an anti-CD112R antibody.

6. The method of claim 1, wherein the composition comprises an anti-CD16 antibody and an anti-CD112R antibody.

7. The method of claim 1, wherein the composition comprises an anti-CD112R antibody and the antibody is an IgG1.

8. The method of claim 1, wherein the cancer is carcinoma, lymphoma, blastoma, sarcoma, or leukemia.

9. The method of claim 8, wherein the cancer is squamous cell cancer, small-cell lung cancer, pituitary cancer, esophageal cancer, astrocytoma, soft tissue sarcoma, non-small cell lung cancer, adenocarcinoma of the lung, squamous carcinoma of the lung, cancer of the peritoneum, hepatocellular cancer, gastrointestinal cancer, pancreatic cancer, glioblastoma, cervical cancer, ovarian cancer, liver cancer, bladder cancer, hepatoma, breast cancer, colon cancer, colorectal cancer, endometrial or uterine carcinoma, salivary gland carcinoma, kidney cancer, renal cell carcinoma, liver cancer, prostate cancer, vulval cancer, thyroid cancer, hepatic carcinoma, brain cancer, endometrial cancer, testis cancer, cholangiocarcinoma, gallbladder carcinoma, gastric cancer, melanoma, or head and neck cancer.

10. The method of claim 1, further comprising administering a second therapy.

11. The method of claim 10, wherein the second therapy is radiotherapy or surgery.

12. The method of claim 10, wherein the second therapy is administration of a chemotherapy, an opsonizing agent, or a regulatory T cell depleting agent.

13. The method of claim 10, wherein the second therapy is administration of an antagonist of PD-1, PD-L1, CTLA-4, Lag-3 or TIM-3.

14. The method of claim 10, wherein the second therapy is administration of an antagonist of TIGIT or CD96.

15. The method of claim 10, wherein the second therapy is administration of an antagonist of PVRL1, PVRL2, PVRL3, PVRL4, and or CD155.

16. The method of claim 10, wherein the second therapy is administration of an antagonist of CD47.

17. The method of claim 10, wherein the second therapy is administration of an antagonist of CD39.

18. The method of claim 10, wherein the second therapy is administration of an antagonist of IL-27.

19. The method of claim 10, wherein the second therapy is administration of a STING agonist.

20. The method of claim 13, wherein the antagonist is an antibody.
